United States Patent Application Publication US 2025/0152746 A1 - sequence listing, part 3

SEQ ID NO: 2566 - RNA, 103 nt, synthetic construct; identical to SEQ ID NO: 1699
  source 1..103: mol_type = other RNA
  modified_base 1: mod_base = OTHER; note = 2'-O-Methyl-guanosine phosphorothioate
  modified_base 2: mod_base = OTHER; note = 2'-O-Methyl-adenosine phosphorothioate
  modified_base 3: mod_base = OTHER; note = 2'-O-Methyl-guanosine
  modified_base 21: mod_base = OTHER; note = 2'-O-Methyl-guanosine
  modified_base 25: mod_base = OTHER; note = uridine phosphorothioate
  modified_base 28: mod_base = OTHER; note = 2'-O-Methyl-adenosine
  modified_base 29: mod_base = OTHER; note = 2'-O-Methyl-guanosine
  modified_base 30: mod_base = OTHER; note = 2'-O-Methyl-cytidine
  modified_base 31: mod_base = OTHER; note = 2'-O-Methyl-uridine
  modified_base 32: mod_base = OTHER; note = 2'-O-Methyl-adenosine
  modified_base 33: mod_base = OTHER; note = 2'-O-Methyl-guanosine
  modified_base 34: mod_base = OTHER; note = 2'-O-Methyl-adenosine
  modified_base 35: mod_base = OTHER; note = 2'-O-Methyl-adenosine
  modified_base 36: mod_base = OTHER; note = 2'-O-Methyl-adenosine
  modified_base 37: mod_base = OTHER; note = 2'-O-Methyl-uridine
  modified_base 38: mod_base = OTHER; note = 2'-O-Methyl-adenosine
  modified_base 39: mod_base = OTHER; note = 2'-O-Methyl-guanosine
  modified_base 40: mod_base = OTHER; note = 2'-O-Methyl-cytidine
  modified_base 41: mod_base = OTHER; note = 2'-O-Methyl-adenosine
  modified_base 42: mod_base = OTHER; note = 2'-O-Methyl-adenosine
  modified_base 46: mod_base = OTHER; note = 2'-O-Methyl-adenosine
  modified_base 48: mod_base = OTHER; note = 2'-O-Methyl-adenosine
  modified_base 50: mod_base = OTHER; note = 2'-O-Methyl-uridine
  modified_base 52: mod_base = OTHER; note = 2'-O-Methyl-adenosine
  modified_base 53: mod_base = OTHER; note = 2'-O-Methyl-guanosine
  modified_base 54: mod_base = OTHER; note = 2'-O-Methyl-guanosine
  modified_base 55: mod_base = OTHER; note = 2'-O-Methyl-cytidine
  modified_base 56: mod_base = OTHER; note = 2'-O-Methyl-uridine
  modified_base 57: mod_base = OTHER; note = 2'-O-Methyl-adenosine
  modified_base 60: mod_base = OTHER; note = 2'-O-Methyl-cytidine
  modified_base 61: mod_base = OTHER; note = 2'-O-Methyl-cytidine
  modified_base 64: mod_base = OTHER; note = uridine phosphorothioate
  modified_base 66: mod_base = OTHER; note = 2'-O-Methyl-uridine
  modified_base 67: mod_base = OTHER; note = 2'-O-Methyl-cytidine
  modified_base 70: mod_base = OTHER; note = 2'-O-Methyl-cytidine
  modified_base 71: mod_base = OTHER; note = 2'-O-Methyl-uridine
  modified_base 72: mod_base = OTHER; note = 2'-O-Methyl-uridine
  modified_base 73: mod_base = OTHER; note = 2'-O-Methyl-guanosine
  modified_base 74: mod_base = OTHER; note = 2'-O-Methyl-adenosine
  modified_base 75: mod_base = OTHER; note = 2'-O-Methyl-adenosine
  modified_base 76: mod_base = OTHER; note = 2'-O-Methyl-adenosine
  modified_base 77: mod_base = OTHER; note = 2'-O-Methyl-adenosine
  modified_base 78: mod_base = OTHER; note = 2'-O-Methyl-adenosine
  modified_base 79: mod_base = OTHER; note = 2'-O-Methyl-guanosine
  modified_base 80: mod_base = OTHER; note = 2'-O-Methyl-uridine
  modified_base 81: mod_base = OTHER; note = 2'-O-Methyl-guanosine
  modified_base 83: mod_base = OTHER; note = 2'-O-Methyl-cytidine
  modified_base 84: mod_base = OTHER; note = 2'-O-Methyl-adenosine
  modified_base 85: mod_base = OTHER; note = 2'-O-Methyl-cytidine
  modified_base 86: mod_base = OTHER; note = 2'-O-Methyl-cytidine
  modified_base 87: mod_base = OTHER; note = 2'-O-Methyl-guanosine
  modified_base 88: mod_base = OTHER; note = 2'-O-Methyl-adenosine
  modified_base 89: mod_base = OTHER; note = 2'-O-Methyl-guanosine
  modified_base 90: mod_base = OTHER; note = 2'-O-Methyl-uridine
  modified_base 91: mod_base = OTHER; note = 2'-O-Methyl-cytidine
  modified_base 92: mod_base = OTHER; note = 2'-O-Methyl-guanosine
  modified_base 93: mod_base = OTHER; note = 2'-O-Methyl-guanosine
  modified_base 94: mod_base = OTHER; note = 2'-O-Methyl-uridine
  modified_base 95: mod_base = OTHER; note = 2'-O-Methyl-guanosine
  modified_base 96: mod_base = OTHER; note = 2'-O-Methyl-cytidine
  modified_base 97: mod_base = OTHER; note = 2'-O-Methyl-uridine phosphorothioate
  modified_base 98: mod_base = OTHER; note = 2'-O-Methyl-uridine phosphorothioate
  modified_base 99: mod_base = OTHER; note = 2'-O-Methyl-uridine phosphorothioate
  modified_base 100: mod_base = OTHER; note = 2'-O-Methyl-uridine

SEQ ID NO: 2567 - RNA, 103 nt, synthetic construct; identical to SEQ ID NO: 1699
  source 1..103: mol_type = other RNA
  modified_base 1: mod_base = OTHER; note = 2'-O-Methyl-guanosine phosphorothioate
  modified_base 2: mod_base = OTHER; note = 2'-O-Methyl-adenosine phosphorothioate
  modified_base 3: mod_base = OTHER; note = 2'-O-Methyl-guanosine
  modified_base 21: mod_base = OTHER; note = 2'-O-Methyl-guanosine
  modified_base 25: mod_base = OTHER; note = uridine phosphorothioate
  modified_base 28: mod_base = OTHER; note = 2'-O-Methyl-adenosine
  modified_base 29: mod_base = OTHER; note = 2'-O-Methyl-guanosine
  modified_base 30: mod_base = OTHER; note = 2'-O-Methyl-cytidine
  modified_base 31: mod_base = OTHER; note = 2'-O-Methyl-uridine
  modified_base 32: mod_base = OTHER; note = 2'-O-Methyl-adenosine
  modified_base 34: mod_base = OTHER; note = 2'-O-Methyl-adenosine
  modified_base 35: mod_base = OTHER; note = 2'-O-Methyl-adenosine
  modified_base 36: mod_base = OTHER; note = 2'-O-Methyl-adenosine
  modified_base 37: mod_base = OTHER; note = 2'-O-Methyl-uridine
  modified_base 38: mod_base = OTHER; note = 2'-O-Methyl-adenosine
  modified_base 39: mod_base = OTHER; note = 2'-O-Methyl-guanosine
  modified_base 40: mod_base = OTHER; note = 2'-O-Methyl-cytidine
  modified_base 41: mod_base = OTHER; note = 2'-O-Methyl-adenosine
  modified_base 42: mod_base = OTHER; note = 2'-O-Methyl-adenosine
  modified_base 46: mod_base = OTHER; note = 2'-O-Methyl-adenosine
  modified_base 48: mod_base = OTHER; note = 2'-O-Methyl-adenosine
  modified_base 50: mod_base = OTHER; note = 2'-O-Methyl-uridine
  modified_base 52: mod_base = OTHER; note = 2'-O-Methyl-adenosine
  modified_base 53: mod_base = OTHER; note = 2'-O-Methyl-guanosine
  modified_base 54: mod_base = OTHER; note = 2'-O-Methyl-guanosine
  modified_base 55: mod_base = OTHER; note = 2'-O-Methyl-cytidine
  modified_base 56: mod_base = OTHER; note = 2'-O-Methyl-uridine
  modified_base 57: mod_base = OTHER; note = 2'-O-Methyl-adenosine
  modified_base 60: mod_base = OTHER; note = 2'-O-Methyl-cytidine
  modified_base 61: mod_base = OTHER; note = 2'-O-Methyl-cytidine
  modified_base 64: mod_base = OTHER; note = uridine phosphorothioate
  modified_base 66: mod_base = OTHER; note = 2'-O-Methyl-uridine
  modified_base 67: mod_base = OTHER; note = 2'-O-Methyl-cytidine
  modified_base 70: mod_base = OTHER; note = 2'-O-Methyl-cytidine
  modified_base 71: mod_base = OTHER; note = 2'-O-Methyl-uridine
  modified_base 72: mod_base = OTHER; note = 2'-O-Methyl-uridine
  modified_base 74: mod_base = OTHER; note = 2'-O-Methyl-adenosine
  modified_base 75: mod_base = OTHER; note = 2'-O-Methyl-adenosine
  modified_base 76: mod_base = OTHER; note = 2'-O-Methyl-adenosine
  modified_base 77: mod_base = OTHER; note = 2'-O-Methyl-adenosine
  modified_base 78: mod_base = OTHER; note = 2'-O-Methyl-adenosine
  modified_base 79: mod_base = OTHER; note = 2'-O-Methyl-guanosine
  modified_base 80: mod_base = OTHER; note = 2'-O-Methyl-uridine
  modified_base 81: mod_base = OTHER; note = 2'-O-Methyl-guanosine
  modified_base 83: mod_base = OTHER; note = 2'-O-Methyl-cytidine
  modified_base 84: mod_base = OTHER; note = 2'-O-Methyl-adenosine
  modified_base 85: mod_base = OTHER; note = 2'-O-Methyl-cytidine
  modified_base 86: mod_base = OTHER; note = 2'-O-Methyl-cytidine
  modified_base 87: mod_base = OTHER; note = 2'-O-Methyl-guanosine
  modified_base 88: mod_base = OTHER; note = 2'-O-Methyl-adenosine
  modified_base 89: mod_base = OTHER; note = 2'-O-Methyl-guanosine
  modified_base 90: mod_base = OTHER; note = 2'-O-Methyl-uridine
  modified_base 91: mod_base = OTHER; note = 2'-O-Methyl-cytidine
  modified_base 92: mod_base = OTHER; note = 2'-O-Methyl-guanosine
  modified_base 93: mod_base = OTHER; note = 2'-O-Methyl-guanosine
  modified_base 94: mod_base = OTHER; note = 2'-O-Methyl-uridine
  modified_base 95: mod_base = OTHER; note = 2'-O-Methyl-guanosine
  modified_base 96: mod_base = OTHER; note = 2'-O-Methyl-cytidine
  modified_base 97: mod_base = OTHER; note = 2'-O-Methyl-uridine phosphorothioate
  modified_base 98: mod_base = OTHER; note = 2'-O-Methyl-uridine phosphorothioate
  modified_base 99: mod_base = OTHER; note = 2'-O-Methyl-uridine phosphorothioate
  modified_base 100: mod_base = OTHER; note = 2'-O-Methyl-uridine

SEQ ID NO: 2568 - RNA, 103 nt, synthetic construct; identical to SEQ ID NO: 1700
  source 1..103: mol_type = other RNA
  modified_base 1: mod_base = OTHER; note = 2'-O-Methyl-cytidine phosphorothioate
  modified_base 2: mod_base = OTHER; note = 2'-O-Methyl-adenosine phosphorothioate
  modified_base 3: mod_base = OTHER; note = 2'-O-Methyl-guanosine
  modified_base 21: mod_base = OTHER; note = 2'-O-Methyl-guanosine
  modified_base 25: mod_base = OTHER; note = uridine phosphorothioate
  modified_base 28: mod_base = OTHER; note = 2'-O-Methyl-adenosine
  modified_base 29: mod_base = OTHER; note = 2'-O-Methyl-guanosine
  modified_base 30: mod_base = OTHER; note = 2'-O-Methyl-cytidine
  modified_base 31: mod_base = OTHER; note = 2'-O-Methyl-uridine
  modified_base 32: mod_base = OTHER; note = 2'-O-Methyl-adenosine
  modified_base 33: mod_base = OTHER; note = 2'-O-Methyl-guanosine
  modified_base 34: mod_base = OTHER; note = 2'-O-Methyl-adenosine
  modified_base 35: mod_base = OTHER; note = 2'-O-Methyl-adenosine
  modified_base 36: mod_base = OTHER; note = 2'-O-Methyl-adenosine
  modified_base 37: mod_base = OTHER; note = 2'-O-Methyl-uridine
  modified_base 38: mod_base = OTHER; note = 2'-O-Methyl-adenosine
  modified_base 39: mod_base = OTHER; note = 2'-O-Methyl-guanosine
  modified_base 40: mod_base = OTHER; note = 2'-O-Methyl-cytidine
  modified_base 41: mod_base = OTHER; note = 2'-O-Methyl-adenosine
  modified_base 42: mod_base = OTHER; note = 2'-O-Methyl-adenosine
  modified_base 46: mod_base = OTHER; note = 2'-O-Methyl-adenosine
  modified_base 48: mod_base = OTHER; note = 2'-O-Methyl-adenosine
  modified_base 50: mod_base = OTHER; note = 2'-O-Methyl-uridine
  modified_base 52: mod_base = OTHER; note = 2'-O-Methyl-adenosine
  modified_base 53: mod_base = OTHER; note = 2'-O-Methyl-guanosine
  modified_base 54: mod_base = OTHER; note = 2'-O-Methyl-guanosine
  modified_base 57: mod_base = OTHER; note = 2'-O-Methyl-adenosine
  modified_base 61: mod_base = OTHER; note = 2'-O-Methyl-cytidine
  modified_base 64: mod_base = OTHER; note = uridine phosphorothioate
  modified_base 66: mod_base = OTHER; note = 2'-O-Methyl-uridine
  modified_base 67: mod_base = OTHER; note = 2'-O-Methyl-cytidine
  modified_base 70: mod_base = OTHER; note = 2'-O-Methyl-cytidine
  modified_base 71: mod_base = OTHER; note = 2'-O-Methyl-uridine
  modified_base 72: mod_base = OTHER; note = 2'-O-Methyl-uridine
  modified_base 74: mod_base = OTHER; note = 2'-O-Methyl-adenosine
  modified_base 75: mod_base = OTHER; note = 2'-O-Methyl-adenosine
  modified_base 76: mod_base = OTHER; note = 2'-O-Methyl-adenosine
  modified_base 77: mod_base = OTHER; note = 2'-O-Methyl-adenosine
  modified_base 78: mod_base = OTHER; note = 2'-O-Methyl-adenosine
  modified_base 79: mod_base = OTHER; note = 2'-O-Methyl-guanosine
  modified_base 80: mod_base = OTHER; note = 2'-O-Methyl-uridine
  modified_base 82: mod_base = OTHER; note = 2'-O-Methyl-guanosine
  modified_base 83: mod_base = OTHER; note = 2'-O-Methyl-cytidine
  modified_base 84: mod_base = OTHER; note = 2'-O-Methyl-adenosine
  modified_base 85: mod_base = OTHER; note = 2'-O-Methyl-cytidine
  modified_base 86: mod_base = OTHER; note = 2'-O-Methyl-cytidine
  modified_base 87: mod_base = OTHER; note = 2'-O-Methyl-guanosine
  modified_base 89: mod_base = OTHER; note = 2'-O-Methyl-guanosine
  modified_base 92: mod_base = OTHER; note = 2'-O-Methyl-guanosine
  modified_base 93: mod_base = OTHER; note = 2'-O-Methyl-guanosine
  modified_base 94: mod_base = OTHER; note = 2'-O-Methyl-uridine
  modified_base 95: mod_base = OTHER; note = 2'-O-Methyl-guanosine
  modified_base 96: mod_base = OTHER; note = 2'-O-Methyl-cytidine
  modified_base 97: mod_base = OTHER; note = 2'-O-Methyl-uridine phosphorothioate
  modified_base 98: mod_base = OTHER; note = 2'-O-Methyl-uridine phosphorothioate
  modified_base 99: mod_base = OTHER; note = 2'-O-Methyl-uridine phosphorothioate
  modified_base 100: mod_base = OTHER; note = 2'-O-Methyl-uridine

SEQ ID NO: 2569 - RNA, 103 nt, synthetic construct; identical to SEQ ID NO: 1700
  source 1..103: mol_type = other RNA
  modified_base 1: mod_base = OTHER; note = 2'-O-Methyl-cytidine phosphorothioate
  modified_base 2: mod_base = OTHER; note = 2'-O-Methyl-adenosine phosphorothioate
  modified_base 3: mod_base = OTHER; note = 2'-O-Methyl-guanosine
  modified_base 21: mod_base = OTHER; note = 2'-O-Methyl-guanosine
  modified_base 25: mod_base = OTHER; note = uridine phosphorothioate
  modified_base 28: mod_base = OTHER; note = 2'-O-Methyl-adenosine
  modified_base 29: mod_base = OTHER; note = 2'-O-Methyl-guanosine
  modified_base 30: mod_base = OTHER; note = 2'-O-Methyl-cytidine
  modified_base 31: mod_base = OTHER; note = 2'-O-Methyl-uridine
  modified_base 32: mod_base = OTHER; note = 2'-O-Methyl-adenosine
  modified_base 33: mod_base = OTHER; note = 2'-O-Methyl-guanosine
  modified_base 34: mod_base = OTHER; note = 2'-O-Methyl-adenosine
  modified_base 35: mod_base = OTHER; note = 2'-O-Methyl-adenosine
  modified_base 36: mod_base = OTHER; note = 2'-O-Methyl-adenosine
  modified_base 37: mod_base = OTHER; note = 2'-O-Methyl-uridine
  modified_base 38: mod_base = OTHER; note = 2'-O-Methyl-adenosine
  modified_base 39: mod_base = OTHER; note = 2'-O-Methyl-guanosine
  modified_base 40: mod_base = OTHER; note = 2'-O-Methyl-cytidine
  modified_base 41: mod_base = OTHER; note = 2'-O-Methyl-adenosine
  modified_base 42: mod_base = OTHER; note = 2'-O-Methyl-adenosine
  modified_base 46: mod_base = OTHER; note = 2'-O-Methyl-adenosine
  modified_base 48: mod_base = OTHER; note = 2'-O-Methyl-adenosine
  modified_base 50: mod_base = OTHER; note = 2'-O-Methyl-uridine
  modified_base 52: mod_base = OTHER; note = 2'-O-Methyl-adenosine
  modified_base 53: mod_base = OTHER; note = 2'-O-Methyl-guanosine
  modified_base 54: mod_base = OTHER; note = 2'-O-Methyl-guanosine
  modified_base 55: mod_base = OTHER; note = 2'-O-Methyl-cytidine
  modified_base 56: mod_base = OTHER; note = 2'-O-Methyl-uridine
  modified_base 57: mod_base = OTHER; note = 2'-O-Methyl-adenosine
  modified_base 60: mod_base = OTHER; note = 2'-O-Methyl-cytidine
  modified_base 61: mod_base = OTHER; note = 2'-O-Methyl-cytidine
  modified_base 64: mod_base = OTHER; note = uridine phosphorothioate
  modified_base 66: mod_base = OTHER; note = 2'-O-Methyl-uridine
  modified_base 67: mod_base = OTHER; note = 2'-O-Methyl-cytidine
  modified_base 70: mod_base = OTHER; note = 2'-O-Methyl-cytidine
  modified_base 71: mod_base = OTHER; note = 2'-O-Methyl-uridine
  modified_base 72: mod_base = OTHER; note = 2'-O-Methyl-uridine
  modified_base 74: mod_base = OTHER; note = 2'-O-Methyl-adenosine
  modified_base 75: mod_base = OTHER; note = 2'-O-Methyl-adenosine
  modified_base 76: mod_base = OTHER; note = 2'-O-Methyl-adenosine
  modified_base 77: mod_base = OTHER; note = 2'-O-Methyl-adenosine
  modified_base 78: mod_base = OTHER; note = 2'-O-Methyl-adenosine
  modified_base 79: mod_base = OTHER; note = 2'-O-Methyl-guanosine
  modified_base 80: mod_base = OTHER; note = 2'-O-Methyl-uridine
  modified_base 82: mod_base = OTHER; note = 2'-O-Methyl-guanosine
  modified_base 83: mod_base = OTHER; note = 2'-O-Methyl-cytidine
  modified_base 84: mod_base = OTHER; note = 2'-O-Methyl-adenosine
  modified_base 85: mod_base = OTHER; note = 2'-O-Methyl-cytidine
  modified_base 86: mod_base = OTHER; note = 2'-O-Methyl-cytidine
  modified_base 87: mod_base = OTHER; note = 2'-O-Methyl-guanosine
  modified_base 89: mod_base = OTHER; note = 2'-O-Methyl-guanosine
  modified_base 92: mod_base = OTHER; note = 2'-O-Methyl-guanosine
  modified_base 93: mod_base = OTHER; note = 2'-O-Methyl-guanosine
  modified_base 94: mod_base = OTHER; note = 2'-O-Methyl-uridine
  modified_base 95: mod_base = OTHER; note = 2'-O-Methyl-guanosine
  modified_base 96: mod_base = OTHER; note = 2'-O-Methyl-cytidine
  modified_base 97: mod_base = OTHER; note = 2'-O-Methyl-uridine phosphorothioate
  modified_base 98: mod_base = OTHER; note = 2'-O-Methyl-uridine phosphorothioate
  modified_base 99: mod_base = OTHER; note = 2'-O-Methyl-uridine phosphorothioate
  modified_base 100: mod_base = OTHER; note = 2'-O-Methyl-uridine

SEQ ID NO: 2570 - RNA, 103 nt, synthetic construct; identical to SEQ ID NO: 1700
  source 1..103: mol_type = other RNA
  modified_base 1: mod_base = OTHER; note = 2'-O-Methyl-cytidine phosphorothioate
  modified_base 2: mod_base = OTHER; note = 2'-O-Methyl-adenosine phosphorothioate
  modified_base 3: mod_base = OTHER; note = 2'-O-Methyl-guanosine
  modified_base 21: mod_base = OTHER; note = 2'-O-Methyl-guanosine
  modified_base 25: mod_base = OTHER; note = uridine phosphorothioate
  modified_base 28: mod_base = OTHER; note = 2'-O-Methyl-adenosine
  modified_base 29: mod_base = OTHER; note = 2'-O-Methyl-guanosine
  modified_base 30: mod_base = OTHER; note = 2'-O-Methyl-cytidine
  modified_base 31: mod_base = OTHER; note = 2'-O-Methyl-uridine
  modified_base 32: mod_base = OTHER; note = 2'-O-Methyl-adenosine
  modified_base 33: mod_base = OTHER; note = 2'-O-Methyl-guanosine
  modified_base 34: mod_base = OTHER; note = 2'-O-Methyl-adenosine
  modified_base 35: mod_base = OTHER; note = 2'-O-Methyl-adenosine
  modified_base 36: mod_base = OTHER; note = 2'-O-Methyl-adenosine
  modified_base 37: mod_base = OTHER; note = 2'-O-Methyl-uridine
  modified_base 38: mod_base = OTHER; note = 2'-O-Methyl-adenosine
  modified_base 39: mod_base = OTHER; note = 2'-O-Methyl-guanosine
  modified_base 40: mod_base = OTHER; note = 2'-O-Methyl-cytidine
  modified_base 41: mod_base = OTHER; note = 2'-O-Methyl-adenosine
  modified_base 42: mod_base = OTHER; note = 2'-O-Methyl-adenosine
  modified_base 46: mod_base = OTHER; note = 2'-O-Methyl-adenosine
  modified_base 48: mod_base = OTHER; note = 2'-O-Methyl-adenosine
  modified_base 50: mod_base = OTHER; note = 2'-O-Methyl-uridine
  modified_base 52: mod_base = OTHER; note = 2'-O-Methyl-adenosine
  modified_base 53: mod_base = OTHER; note = 2'-O-Methyl-guanosine
  modified_base 54: mod_base = OTHER; note = 2'-O-Methyl-guanosine
  modified_base 57: mod_base = OTHER; note = 2'-O-Methyl-adenosine
  modified_base 61: mod_base = OTHER; note = 2'-O-Methyl-cytidine
  modified_base 64: mod_base = OTHER; note = uridine phosphorothioate
  modified_base 66: mod_base = OTHER; note = 2'-O-Methyl-uridine
  modified_base 67: mod_base = OTHER; note = 2'-O-Methyl-cytidine
  modified_base 70: mod_base = OTHER; note = 2'-O-Methyl-cytidine
  modified_base 71: mod_base = OTHER; note = 2'-O-Methyl-uridine
  modified_base 72: mod_base = OTHER; note = 2'-O-Methyl-uridine
  modified_base 73: mod_base = OTHER; note = 2'-O-Methyl-guanosine
  modified_base 74: mod_base = OTHER; note = 2'-O-Methyl-adenosine
  modified_base 75: mod_base = OTHER; note = 2'-O-Methyl-adenosine
  modified_base 76: mod_base = OTHER; note = 2'-O-Methyl-adenosine
  modified_base 77: mod_base = OTHER; note = 2'-O-Methyl-adenosine
  modified_base 78: mod_base = OTHER; note = 2'-O-Methyl-adenosine
  modified_base 79: mod_base = OTHER; note = 2'-O-Methyl-guanosine
  modified_base 80: mod_base = OTHER; note = 2'-O-Methyl-uridine
  modified_base 82: mod_base = OTHER; note = 2'-O-Methyl-guanosine
  modified_base 83: mod_base = OTHER; note = 2'-O-Methyl-cytidine
  modified_base 84: mod_base = OTHER; note = 2'-O-Methyl-adenosine
  modified_base 85: mod_base = OTHER; note = 2'-O-Methyl-cytidine
  modified_base 86: mod_base = OTHER; note = 2'-O-Methyl-cytidine
  modified_base 87: mod_base = OTHER; note = 2'-O-Methyl-guanosine
  modified_base 89: mod_base = OTHER; note = 2'-O-Methyl-guanosine
  modified_base 92: mod_base = OTHER; note = 2'-O-Methyl-guanosine
  modified_base 93: mod_base = OTHER; note = 2'-O-Methyl-guanosine
  modified_base 94: mod_base = OTHER; note = 2'-O-Methyl-uridine
  modified_base 95: mod_base = OTHER; note = 2'-O-Methyl-guanosine
  modified_base 96: mod_base = OTHER; note = 2'-O-Methyl-cytidine
  modified_base 97: mod_base = OTHER; note = 2'-O-Methyl-uridine phosphorothioate
  modified_base 98: mod_base = OTHER; note = 2'-O-Methyl-uridine phosphorothioate
  modified_base 99: mod_base = OTHER; note = 2'-O-Methyl-uridine phosphorothioate
  modified_base 100: mod_base = OTHER; note = 2'-O-Methyl-uridine

SEQ ID NO: 2571 - RNA, 103 nt, synthetic construct; identical to SEQ ID NO: 1700
  source 1..103: mol_type = other RNA
  modified_base 1: mod_base = OTHER; note = 2'-O-Methyl-cytidine phosphorothioate
  modified_base 2: mod_base = OTHER; note = 2'-O-Methyl-adenosine phosphorothioate
  modified_base 3: mod_base = OTHER; note = 2'-O-Methyl-guanosine
  modified_base 21: mod_base = OTHER; note = 2'-O-Methyl-guanosine
  modified_base 25: mod_base = OTHER; note = uridine phosphorothioate
  modified_base 28: mod_base = OTHER; note = 2'-O-Methyl-adenosine
  modified_base 29: mod_base = OTHER; note = 2'-O-Methyl-guanosine
  modified_base 30: mod_base = OTHER; note = 2'-O-Methyl-cytidine
  modified_base 31: mod_base = OTHER; note = 2'-O-Methyl-uridine
  modified_base 32: mod_base = OTHER; note = 2'-O-Methyl-adenosine
  modified_base 33: mod_base = OTHER; note = 2'-O-Methyl-guanosine
  modified_base 34: mod_base = OTHER; note = 2'-O-Methyl-adenosine
  modified_base 35: mod_base = OTHER; note = 2'-O-Methyl-adenosine
  modified_base 36: mod_base = OTHER; note = 2'-O-Methyl-adenosine
  modified_base 37: mod_base = OTHER; note = 2'-O-Methyl-uridine
  modified_base 38: mod_base = OTHER; note = 2'-O-Methyl-adenosine
  modified_base 39: mod_base = OTHER; note = 2'-O-Methyl-guanosine
  modified_base 40: mod_base = OTHER; note = 2'-O-Methyl-cytidine
  modified_base 41: mod_base = OTHER; note = 2'-O-Methyl-adenosine
  modified_base 42: mod_base = OTHER; note = 2'-O-Methyl-adenosine
  modified_base 46: mod_base = OTHER; note = 2'-O-Methyl-adenosine
  modified_base 48: mod_base = OTHER; note = 2'-O-Methyl-adenosine
  modified_base 50: mod_base = OTHER; note = 2'-O-Methyl-uridine
  modified_base 52: mod_base = OTHER; note = 2'-O-Methyl-adenosine
  modified_base 53: mod_base = OTHER; note = 2'-O-Methyl-guanosine
  modified_base 54: mod_base = OTHER; note = 2'-O-Methyl-guanosine
  modified_base 57: mod_base = OTHER; note = 2'-O-Methyl-adenosine
  modified_base 61: mod_base = OTHER; note = 2'-O-Methyl-cytidine
  modified_base 64: mod_base = OTHER; note = uridine phosphorothioate
  modified_base 66: mod_base = OTHER; note = 2'-O-Methyl-uridine
  modified_base 67: mod_base = OTHER; note = 2'-O-Methyl-cytidine
  modified_base 70: mod_base = OTHER; note = 2'-O-Methyl-cytidine
  modified_base 71: mod_base = OTHER; note = 2'-O-Methyl-uridine
  modified_base 72: mod_base = OTHER; note = 2'-O-Methyl-uridine
  modified_base 73: mod_base = OTHER; note = 2'-O-Methyl-guanosine
  modified_base 74: mod_base = OTHER; note = 2'-O-Methyl-adenosine
  modified_base 75: mod_base = OTHER; note = 2'-O-Methyl-adenosine
  modified_base 76: mod_base = OTHER; note = 2'-O-Methyl-adenosine
  modified_base 77: mod_base = OTHER; note = 2'-O-Methyl-adenosine
  modified_base 78: mod_base = OTHER; note = 2'-O-Methyl-adenosine
  modified_base 79: mod_base = OTHER; note = 2'-O-Methyl-guanosine
  modified_base 80: mod_base = OTHER; note = 2'-O-Methyl-uridine
  modified_base 82: mod_base = OTHER; note = 2'-O-Methyl-guanosine
  modified_base 83: mod_base = OTHER; note = 2'-O-Methyl-cytidine
  modified_base 84: mod_base = OTHER; note = 2'-O-Methyl-adenosine
  modified_base 85: mod_base = OTHER; note = 2'-O-Methyl-cytidine
  modified_base 86: mod_base = OTHER; note = 2'-O-Methyl-cytidine
  modified_base 87: mod_base = OTHER; note = 2'-O-Methyl-guanosine
  modified_base 89: mod_base = OTHER; note = 2'-O-Methyl-guanosine
  modified_base 91: mod_base = OTHER; note = 2'-O-Methyl-cytidine
  modified_base 92: mod_base = OTHER; note = 2'-O-Methyl-guanosine
  modified_base 93: mod_base = OTHER; note = 2'-O-Methyl-guanosine
  modified_base 94: mod_base = OTHER; note = 2'-O-Methyl-uridine
  modified_base 95: mod_base = OTHER; note = 2'-O-Methyl-guanosine
  modified_base 96: mod_base = OTHER; note = 2'-O-Methyl-cytidine
  modified_base 97: mod_base = OTHER; note = 2'-O-Methyl-uridine phosphorothioate
  modified_base 98: mod_base = OTHER; note = 2'-O-Methyl-uridine phosphorothioate
  modified_base 99: mod_base = OTHER; note = 2'-O-Methyl-uridine phosphorothioate
  modified_base 100: mod_base = OTHER; note = 2'-O-Methyl-uridine

SEQ ID NO: 2572 - RNA, 103 nt, synthetic construct; identical to SEQ ID NO: 1700
  source 1..103: mol_type = other RNA
  modified_base 1: mod_base = OTHER; note = 2'-O-Methyl-cytidine phosphorothioate
  modified_base 2: mod_base = OTHER; note = 2'-O-Methyl-adenosine phosphorothioate
  modified_base 3: mod_base = OTHER; note = 2'-O-Methyl-guanosine
  modified_base 21: mod_base = OTHER; note = 2'-O-Methyl-guanosine
  modified_base 25: mod_base = OTHER; note = uridine phosphorothioate
  modified_base 28: mod_base = OTHER; note = 2'-O-Methyl-adenosine
  modified_base 29: mod_base = OTHER; note = 2'-O-Methyl-guanosine
  modified_base 30: mod_base = OTHER; note = 2'-O-Methyl-cytidine
  modified_base 31: mod_base = OTHER; note = 2'-O-Methyl-uridine
  modified_base 32: mod_base = OTHER; note = 2'-O-Methyl-adenosine
  modified_base 34: mod_base = OTHER; note = 2'-O-Methyl-adenosine
  modified_base 35: mod_base = OTHER; note = 2'-O-Methyl-adenosine
  modified_base 36: mod_base = OTHER; note = 2'-O-Methyl-adenosine
  modified_base 37: mod_base = OTHER; note = 2'-O-Methyl-uridine
  modified_base 38: mod_base = OTHER; note = 2'-O-Methyl-adenosine
  modified_base 39: mod_base = OTHER; note = 2'-O-Methyl-guanosine
  modified_base 40: mod_base = OTHER; note = 2'-O-Methyl-cytidine
  modified_base 41: mod_base = OTHER; note = 2'-O-Methyl-adenosine
  modified_base 42: mod_base = OTHER; note = 2'-O-Methyl-adenosine
  modified_base 46: mod_base = OTHER; note = 2'-O-Methyl-adenosine
  modified_base 48: mod_base = OTHER; note = 2'-O-Methyl-adenosine
  modified_base 50: mod_base = OTHER; note = 2'-O-Methyl-uridine
  modified_base 52: mod_base = OTHER; note = 2'-O-Methyl-adenosine
  modified_base 53: mod_base = OTHER; note = 2'-O-Methyl-guanosine
  modified_base 54: mod_base = OTHER; note = 2'-O-Methyl-guanosine
  modified_base 57: mod_base = OTHER; note = 2'-O-Methyl-adenosine
  modified_base 61: mod_base = OTHER; note = 2'-O-Methyl-cytidine
  modified_base 64: mod_base = OTHER; note = uridine phosphorothioate
  modified_base 66: mod_base = OTHER; note = 2'-O-Methyl-uridine
  modified_base 67: mod_base = OTHER; note = 2'-O-Methyl-cytidine
  modified_base 70: mod_base = OTHER; note = 2'-O-Methyl-cytidine
  modified_base 71: mod_base = OTHER; note = 2'-O-Methyl-uridine
  modified_base 72: mod_base = OTHER; note = 2'-O-Methyl-uridine
  modified_base 73: mod_base = OTHER; note = 2'-O-Methyl-guanosine
  modified_base 74: mod_base = OTHER; note = 2'-O-Methyl-adenosine
  modified_base 75: mod_base = OTHER; note = 2'-O-Methyl-adenosine
  modified_base 76: mod_base = OTHER; note = 2'-O-Methyl-adenosine
  modified_base 77: mod_base = OTHER; note = 2'-O-Methyl-adenosine
  modified_base 78: mod_base = OTHER; note = 2'-O-Methyl-adenosine
  modified_base 79: mod_base = OTHER; note = 2'-O-Methyl-guanosine
  modified_base 80: mod_base = OTHER; note = 2'-O-Methyl-uridine
  modified_base 82: mod_base = OTHER; note = 2'-O-Methyl-guanosine
  modified_base 83: mod_base = OTHER; note = 2'-O-Methyl-cytidine
  modified_base 84: mod_base = OTHER; note = 2'-O-Methyl-adenosine
  modified_base 85: mod_base = OTHER; note = 2'-O-Methyl-cytidine
  modified_base 86: mod_base = OTHER; note = 2'-O-Methyl-cytidine
  modified_base 87: mod_base = OTHER; note = 2'-O-Methyl-guanosine
  modified_base 89: mod_base = OTHER; note = 2'-O-Methyl-guanosine
  modified_base 92: mod_base = OTHER; note = 2'-O-Methyl-guanosine
  modified_base 93: mod_base = OTHER; note = 2'-O-Methyl-guanosine
  modified_base 94: mod_base = OTHER; note = 2'-O-Methyl-uridine
  modified_base 95: mod_base = OTHER; note = 2'-O-Methyl-guanosine
  modified_base 96: mod_base = OTHER; note = 2'-O-Methyl-cytidine
  modified_base 97: mod_base = OTHER; note = 2'-O-Methyl-uridine phosphorothioate
  modified_base 98: mod_base = OTHER; note = 2'-O-Methyl-uridine phosphorothioate
  modified_base 99: mod_base = OTHER; note = 2'-O-Methyl-uridine phosphorothioate
  modified_base 100: mod_base = OTHER; note = 2'-O-Methyl-uridine

SEQ ID NO: 2573 - RNA, 103 nt, synthetic construct; identical to SEQ ID NO: 1700
  source 1..103: mol_type = other RNA
  modified_base 1: mod_base = OTHER; note = 2'-O-Methyl-cytidine phosphorothioate
  modified_base 2: mod_base = OTHER; note = 2'-O-Methyl-adenosine phosphorothioate
  modified_base 3: mod_base = OTHER; note = 2'-O-Methyl-guanosine
  modified_base 21: mod_base = OTHER; note = 2'-O-Methyl-guanosine
  modified_base 25: mod_base = OTHER; note = uridine phosphorothioate
  modified_base 28: mod_base = OTHER; note = 2'-O-Methyl-adenosine
  modified_base 29: mod_base = OTHER; note = 2'-O-Methyl-guanosine
  modified_base 30: mod_base = OTHER; note = 2'-O-Methyl-cytidine
  modified_base 31: mod_base = OTHER; note = 2'-O-Methyl-uridine
  modified_base 32: mod_base = OTHER; note = 2'-O-Methyl-adenosine
  modified_base 34: mod_base = OTHER; note = 2'-O-Methyl-adenosine
  modified_base 35: mod_base = OTHER; note = 2'-O-Methyl-adenosine
  modified_base 36: mod_base = OTHER; note = 2'-O-Methyl-adenosine
  modified_base 37: mod_base = OTHER; note = 2'-O-Methyl-uridine
  modified_base 38: mod_base = OTHER; note = 2'-O-Methyl-adenosine
  modified_base 39: mod_base = OTHER; note = 2'-O-Methyl-guanosine
  modified_base 40: mod_base = OTHER; note = 2'-O-Methyl-cytidine
  modified_base 41: mod_base = OTHER; note = 2'-O-Methyl-adenosine
  modified_base 42: mod_base = OTHER; note = 2'-O-Methyl-adenosine
  modified_base 46: mod_base = OTHER; note = 2'-O-Methyl-adenosine
  modified_base 48: mod_base = OTHER; note = 2'-O-Methyl-adenosine
  modified_base 50: mod_base = OTHER; note = 2'-O-Methyl-uridine
  modified_base 52: mod_base = OTHER; note = 2'-O-Methyl-adenosine
  modified_base 53: mod_base = OTHER; note = 2'-O-Methyl-guanosine
  modified_base 54: mod_base = OTHER; note = 2'-O-Methyl-guanosine
  modified_base 57: mod_base = OTHER; note = 2'-O-Methyl-adenosine
  modified_base 61: mod_base = OTHER; note = 2'-O-Methyl-cytidine
  modified_base 64: mod_base = OTHER; note = uridine phosphorothioate
  modified_base 66: mod_base = OTHER; note = 2'-O-Methyl-uridine
  modified_base 67: mod_base = OTHER; note = 2'-O-Methyl-cytidine
  modified_base 70: mod_base = OTHER; note = 2'-O-Methyl-cytidine
  modified_base 71: mod_base = OTHER; note = 2'-O-Methyl-uridine
  modified_base 72: mod_base = OTHER; note = 2'-O-Methyl-uridine
  modified_base 73: mod_base = OTHER; note = 2'-O-Methyl-guanosine
  modified_base 74: mod_base = OTHER; note = 2'-O-Methyl-adenosine
  modified_base 75: mod_base = OTHER; note = 2'-O-Methyl-adenosine
  modified_base 76: mod_base = OTHER; note = 2'-O-Methyl-adenosine
  modified_base 77: mod_base = OTHER; note = 2'-O-Methyl-adenosine
  modified_base 78: mod_base = OTHER; note = 2'-O-Methyl-adenosine
  modified_base 79: mod_base = OTHER; note = 2'-O-Methyl-guanosine
  modified_base 80: mod_base = OTHER; note = 2'-O-Methyl-uridine
  modified_base 82: mod_base = OTHER; note = 2'-O-Methyl-guanosine
  modified_base 83: mod_base = OTHER; note = 2'-O-Methyl-cytidine
  modified_base 84: mod_base = OTHER; note = 2'-O-Methyl-adenosine
  modified_base 85: mod_base = OTHER; note = 2'-O-Methyl-cytidine
  modified_base 86: mod_base = OTHER; note = 2'-O-Methyl-cytidine
  modified_base 87: mod_base = OTHER; note = 2'-O-Methyl-guanosine
  modified_base 89: mod_base = OTHER; note = 2'-O-Methyl-guanosine
  modified_base 91: mod_base = OTHER; note = 2'-O-Methyl-cytidine
  modified_base 92: mod_base = OTHER; note = 2'-O-Methyl-guanosine
  modified_base 93: mod_base = OTHER; note = 2'-O-Methyl-guanosine
  modified_base 94: mod_base = OTHER; note = 2'-O-Methyl-uridine
  modified_base 95: mod_base = OTHER; note = 2'-O-Methyl-guanosine
  modified_base 96: mod_base = OTHER; note = 2'-O-Methyl-cytidine
  modified_base 97: mod_base = OTHER; note = 2'-O-Methyl-uridine phosphorothioate
  modified_base 98: mod_base = OTHER; note = 2'-O-Methyl-uridine phosphorothioate
  modified_base 99: mod_base = OTHER; note = 2'-O-Methyl-uridine phosphorothioate
  modified_base 100: mod_base = OTHER; note = 2'-O-Methyl-uridine

SEQ ID NO: 2574 - RNA, 103 nt, synthetic construct; identical to SEQ ID NO: 1700
  source 1..103: mol_type = other RNA
  modified_base 1: mod_base = OTHER; note = 2'-O-Methyl-cytidine phosphorothioate
  modified_base 2: mod_base = OTHER; note = 2'-O-Methyl-adenosine phosphorothioate
  modified_base 3: mod_base = OTHER; note = 2'-O-Methyl-guanosine
  modified_base 21: mod_base = OTHER; note = 2'-O-Methyl-guanosine
  modified_base 25: mod_base = OTHER; note = uridine phosphorothioate
  modified_base 28: mod_base = OTHER; note = 2'-O-Methyl-adenosine
  modified_base 29: mod_base = OTHER; note = 2'-O-Methyl-guanosine
  modified_base 30: mod_base = OTHER; note = 2'-O-Methyl-cytidine
  modified_base 31: mod_base = OTHER; note = 2'-O-Methyl-uridine
  modified_base 32: mod_base = OTHER; note = 2'-O-Methyl-adenosine
  modified_base 34: mod_base = OTHER; note = 2'-O-Methyl-adenosine
  modified_base 35: mod_base = OTHER; note = 2'-O-Methyl-adenosine
  modified_base 36: mod_base = OTHER; note = 2'-O-Methyl-adenosine
  modified_base 37: mod_base = OTHER; note = 2'-O-Methyl-uridine
  modified_base 38: mod_base = OTHER; note = 2'-O-Methyl-adenosine
  modified_base 39: mod_base = OTHER; note = 2'-O-Methyl-guanosine
  modified_base 40: mod_base = OTHER; note = 2'-O-Methyl-cytidine
  modified_base 41: mod_base = OTHER; note = 2'-O-Methyl-adenosine
  modified_base 42: mod_base = OTHER; note = 2'-O-Methyl-adenosine
  modified_base 46: mod_base = OTHER; note = 2'-O-Methyl-adenosine
  modified_base 48: mod_base = OTHER; note = 2'-O-Methyl-adenosine
  modified_base 50: mod_base = OTHER; note = 2'-O-Methyl-uridine
  modified_base 52: mod_base = OTHER; note = 2'-O-Methyl-adenosine
  modified_base 53: mod_base = OTHER; note = 2'-O-Methyl-guanosine
  modified_base 54: mod_base = OTHER; note = 2'-O-Methyl-guanosine
  modified_base 55: mod_base = OTHER; note = 2'-O-Methyl-cytidine
  modified_base 56: mod_base = OTHER; note = 2'-O-Methyl-uridine
  modified_base 57: mod_base = OTHER; note = 2'-O-Methyl-adenosine
  modified_base 60: mod_base = OTHER; note = 2'-O-Methyl-cytidine
  modified_base 61: mod_base = OTHER; note = 2'-O-Methyl-cytidine
  modified_base 64: mod_base = OTHER; note = uridine phosphorothioate
  modified_base 66: mod_base = OTHER; note = 2'-O-Methyl-uridine
  modified_base 67: mod_base = OTHER; note = 2'-O-Methyl-cytidine
  modified_base 70: mod_base = OTHER; note = 2'-O-Methyl-cytidine
  modified_base 71: mod_base = OTHER; note = 2'-O-Methyl-uridine
  modified_base 72: mod_base = OTHER; note = 2'-O-Methyl-uridine
  modified_base 74: mod_base = OTHER; note = 2'-O-Methyl-adenosine
  modified_base 75: mod_base = OTHER; note = 2'-O-Methyl-adenosine
  modified_base 76: mod_base = OTHER; note = 2'-O-Methyl-adenosine
  modified_base 77: mod_base = OTHER; note = 2'-O-Methyl-adenosine
  modified_base 78: mod_base = OTHER; note = 2'-O-Methyl-adenosine
  modified_base 79: mod_base = OTHER; note = 2'-O-Methyl-guanosine
  modified_base 80: mod_base = OTHER; note = 2'-O-Methyl-uridine
  modified_base 82: mod_base = OTHER; note = 2'-O-Methyl-guanosine
  modified_base 83: mod_base = OTHER; note = 2'-O-Methyl-cytidine
  modified_base 84: mod_base = OTHER; note = 2'-O-Methyl-adenosine
  modified_base 85: mod_base = OTHER; note = 2'-O-Methyl-cytidine
  modified_base 86: mod_base = OTHER; note = 2'-O-Methyl-cytidine
  modified_base 87: mod_base = OTHER; note = 2'-O-Methyl-guanosine
  modified_base 89: mod_base = OTHER; note = 2'-O-Methyl-guanosine
  modified_base 92: mod_base = OTHER; note = 2'-O-Methyl-guanosine
  modified_base 93: mod_base = OTHER; note = 2'-O-Methyl-guanosine
  modified_base 94: mod_base = OTHER; note = 2'-O-Methyl-uridine
  modified_base 95: mod_base = OTHER; note = 2'-O-Methyl-guanosine
  modified_base 96: mod_base = OTHER; note = 2'-O-Methyl-cytidine
  modified_base 97: mod_base = OTHER; note = 2'-O-Methyl-uridine phosphorothioate
  modified_base 98: mod_base = OTHER; note = 2'-O-Methyl-uridine phosphorothioate
  modified_base 99: mod_base = OTHER; note = 2'-O-Methyl-uridine phosphorothioate
  modified_base 100: mod_base = OTHER; note = 2'-O-Methyl-uridine

SEQ ID NO: 2575 - RNA, 103 nt, synthetic construct; identical to SEQ ID NO: 1643
  source 1..103: mol_type = other RNA
  modified_base 1: mod_base = OTHER; note = 2'-O-Methyl-cytidine phosphorothioate
  modified_base 2: mod_base = OTHER; note = 2'-O-Methyl-cytidine phosphorothioate
  modified_base 3: mod_base = OTHER; note = 2'-O-Methyl-cytidine
  modified_base 21: mod_base = OTHER; note = 2'-O-Methyl-guanosine
  modified_base 25: mod_base = OTHER; note = uridine phosphorothioate
  modified_base 28: mod_base = OTHER; note = 2'-O-Methyl-adenosine
  modified_base 29: mod_base = OTHER; note = 2'-O-Methyl-guanosine
  modified_base 30: mod_base = OTHER; note = 2'-O-Methyl-cytidine
  modified_base 31: mod_base = OTHER; note = 2'-O-Methyl-uridine
  modified_base 32: mod_base = OTHER; note = 2'-O-Methyl-adenosine
  modified_base 33: mod_base = OTHER; note = 2'-O-Methyl-guanosine
  modified_base 34: mod_base = OTHER; note = 2'-O-Methyl-adenosine
  modified_base 35: mod_base = OTHER; note = 2'-O-Methyl-adenosine
  modified_base 36: mod_base = OTHER; note = 2'-O-Methyl-adenosine
  modified_base 37: mod_base = OTHER; note = 2'-O-Methyl-uridine
  modified_base 38: mod_base = OTHER; note = 2'-O-Methyl-adenosine
  modified_base 39: mod_base = OTHER; note = 2'-O-Methyl-guanosine
  modified_base 40: mod_base = OTHER; note = 2'-O-Methyl-cytidine
  modified_base 41: mod_base = OTHER; note = 2'-O-Methyl-adenosine
  modified_base 42: mod_base = OTHER; note = 2'-O-Methyl-adenosine
  modified_base 45: mod_base = OTHER; note = uridine phosphorothioate
  modified_base 46: mod_base = OTHER; note = 2'-O-Methyl-adenosine
  modified_base 48: mod_base = OTHER; note = 2'-O-Methyl-adenosine
  modified_base 50: mod_base = OTHER; note = 2'-O-Methyl-uridine
  modified_base 52: mod_base = OTHER; note = 2'-O-Methyl-adenosine
  modified_base 53: mod_base = OTHER; note = 2'-O-Methyl-guanosine
  modified_base 54: mod_base = OTHER; note = 2'-O-Methyl-guanosine
  modified_base 55: mod_base = OTHER; note = 2'-O-Methyl-cytidine
  modified_base 56: mod_base = OTHER; note = 2'-O-Methyl-uridine
  modified_base 57: mod_base = OTHER; note = 2'-O-Methyl-adenosine
  modified_base 60: mod_base = OTHER; note = 2'-O-Methyl-cytidine
  modified_base 61: mod_base = OTHER; note = 2'-O-Methyl-cytidine
  modified_base 64: mod_base = OTHER; note = uridine phosphorothioate
  modified_base 66: mod_base = OTHER; note = 2'-O-Methyl-uridine
  modified_base 67: mod_base = OTHER; note = 2'-O-Methyl-cytidine
  modified_base 70: mod_base = OTHER; note = 2'-O-Methyl-cytidine
  modified_base 71: mod_base = OTHER; note = 2'-O-Methyl-uridine
  modified_base 72: mod_base = OTHER; note = 2'-O-Methyl-uridine
  modified_base 73: mod_base = OTHER; note = 2'-O-Methyl-guanosine
  modified_base 74: mod_base = OTHER; note = 2'-O-Methyl-adenosine
  modified_base 75: mod_base = OTHER; note = 2'-O-Methyl-adenosine
  modified_base 76: mod_base = OTHER; note = 2'-O-Methyl-adenosine
  modified_base 77: mod_base = OTHER; note = 2'-O-Methyl-adenosine
  modified_base 78: mod_base = OTHER; note = 2'-O-Methyl-adenosine
  modified_base 79: mod_base = OTHER; note = 2'-O-Methyl-guanosine
  modified_base 80: mod_base = OTHER; note = 2'-O-Methyl-uridine
  modified_base 81: mod_base = OTHER; note = 2'-O-Methyl-guanosine
  modified_base 83: mod_base = OTHER; note = 2'-O-Methyl-cytidine
  modified_base 84: mod_base = OTHER; note = 2'-O-Methyl-adenosine
  modified_base 85: mod_base = OTHER; note = 2'-O-Methyl-cytidine
  modified_base 86: mod_base = OTHER; note = 2'-O-Methyl-cytidine
  modified_base 87: mod_base = OTHER; note = 2'-O-Methyl-guanosine
  modified_base 88: mod_base = OTHER; note = 2'-O-Methyl-adenosine
  modified_base 89: mod_base = OTHER; note = 2'-O-Methyl-guanosine
  modified_base 90: mod_base = OTHER; note = 2'-O-Methyl-uridine
  modified_base 91: mod_base = OTHER; note = 2'-O-Methyl-cytidine
  modified_base 92: mod_base = OTHER; note = 2'-O-Methyl-guanosine
  modified_base 93: mod_base = OTHER; note = 2'-O-Methyl-guanosine
  modified_base 94: mod_base = OTHER; note = 2'-O-Methyl-uridine
  modified_base 95: mod_base = OTHER; note = 2'-O-Methyl-guanosine
  modified_base 96: mod_base = OTHER; note = 2'-O-Methyl-cytidine
  modified_base 97: mod_base = OTHER; note = 2'-O-Methyl-uridine phosphorothioate
  modified_base 98: mod_base = OTHER; note = 2'-O-Methyl-uridine phosphorothioate
  modified_base 99: mod_base = OTHER; note = 2'-O-Methyl-uridine phosphorothioate
  modified_base 100: mod_base = OTHER; note = 2'-O-Methyl-uridine

SEQ ID NO: 2576 - RNA, 103 nt, synthetic construct; identical to SEQ ID NO: 1643
  source 1..103: mol_type = other RNA
  modified_base 1: mod_base = OTHER; note = 2'-O-Methyl-cytidine phosphorothioate
  modified_base 2: mod_base = OTHER; note = 2'-O-Methyl-cytidine phosphorothioate
  modified_base 3: mod_base = OTHER; note = 2'-O-Methyl-cytidine
  modified_base 21: mod_base = OTHER; note = 2'-O-Methyl-guanosine
  modified_base 25: mod_base = OTHER; note = uridine phosphorothioate
  modified_base 28: mod_base = OTHER; note = 2'-O-Methyl-adenosine
  modified_base 29: mod_base = OTHER; note = 2'-O-Methyl-guanosine
  modified_base 30: mod_base = OTHER; note = 2'-O-Methyl-cytidine
  modified_base 31: mod_base = OTHER; note = 2'-O-Methyl-uridine
  modified_base 32: mod_base = OTHER; note = 2'-O-Methyl-adenosine
  modified_base 34: mod_base = OTHER; note = 2'-O-Methyl-adenosine
  modified_base 35: mod_base = OTHER; note = 2'-O-Methyl-adenosine
  modified_base 36: mod_base = OTHER; note = 2'-O-Methyl-adenosine
  modified_base 37: mod_base = OTHER; note = 2'-O-Methyl-uridine
  modified_base 38: mod_base = OTHER; note = 2'-O-Methyl-adenosine
  modified_base 39: mod_base = OTHER; note = 2'-O-Methyl-guanosine
  modified_base 40: mod_base = OTHER; note = 2'-O-Methyl-cytidine
  modified_base 41: mod_base = OTHER; note = 2'-O-Methyl-adenosine
  modified_base 42: mod_base = OTHER; note = 2'-O-Methyl-adenosine
  modified_base 45: mod_base = OTHER; note = uridine phosphorothioate
  modified_base 46: mod_base = OTHER; note = 2'-O-Methyl-adenosine
  modified_base 48: mod_base = OTHER; note = 2'-O-Methyl-adenosine
  modified_base 50: mod_base = OTHER; note = 2'-O-Methyl-uridine
  modified_base 52: mod_base = OTHER; note = 2'-O-Methyl-adenosine
  modified_base 53: mod_base = OTHER; note = 2'-O-Methyl-guanosine
  modified_base 54: mod_base = OTHER; note = 2'-O-Methyl-guanosine
  modified_base 55: mod_base = OTHER; note = 2'-O-Methyl-cytidine
  modified_base 56: mod_base = OTHER; note = 2'-O-Methyl-uridine
  modified_base 57: mod_base = OTHER; note = 2'-O-Methyl-adenosine
  modified_base 60: mod_base = OTHER; note = 2'-O-Methyl-cytidine
  modified_base 61: mod_base = OTHER; note = 2'-O-Methyl-cytidine
  modified_base 64: mod_base = OTHER; note = uridine phosphorothioate
  modified_base 66: mod_base = OTHER; note = 2'-O-Methyl-uridine
  modified_base 67: mod_base = OTHER; note = 2'-O-Methyl-cytidine
  modified_base 70: mod_base = OTHER; note = 2'-O-Methyl-cytidine
  modified_base 71: mod_base = OTHER; note = 2'-O-Methyl-uridine
  modified_base 72: mod_base = OTHER; note = 2'-O-Methyl-uridine
  modified_base 74: mod_base = OTHER; note = 2'-O-Methyl-adenosine
  modified_base 75: mod_base = OTHER; note = 2'-O-Methyl-adenosine
  modified_base 76: mod_base = OTHER; note = 2'-O-Methyl-adenosine
  modified_base 77: mod_base = OTHER; note = 2'-O-Methyl-adenosine
  modified_base 78: mod_base = OTHER; note = 2'-O-Methyl-adenosine
  modified_base 79: mod_base = OTHER; note = 2'-O-Methyl-guanosine
  modified_base 80: mod_base = OTHER; note = 2'-O-Methyl-uridine
  modified_base 81: mod_base = OTHER; note = 2'-O-Methyl-guanosine
  modified_base 83: mod_base = OTHER; note = 2'-O-Methyl-cytidine
  modified_base 84: mod_base = OTHER; note = 2'-O-Methyl-adenosine
  modified_base 85: mod_base = OTHER; note = 2'-O-Methyl-cytidine
  modified_base 86: mod_base = OTHER; note = 2'-O-Methyl-cytidine
  modified_base 87: mod_base = OTHER; note = 2'-O-Methyl-guanosine
  modified_base 88: mod_base = OTHER; note = 2'-O-Methyl-adenosine
  modified_base 89: mod_base = OTHER; note = 2'-O-Methyl-guanosine
  modified_base 90: mod_base = OTHER; note = 2'-O-Methyl-uridine
  modified_base 91: mod_base = OTHER; note = 2'-O-Methyl-cytidine
  modified_base 92: mod_base = OTHER; note = 2'-O-Methyl-guanosine
  modified_base 93: mod_base = OTHER; note = 2'-O-Methyl-guanosine
  modified_base 94: mod_base = OTHER; note = 2'-O-Methyl-uridine
  modified_base 95: mod_base = OTHER; note = 2'-O-Methyl-guanosine
  modified_base 96: mod_base = OTHER; note = 2'-O-Methyl-cytidine
  modified_base 97: mod_base = OTHER; note = 2'-O-Methyl-uridine phosphorothioate
  modified_base 98: mod_base = OTHER; note = 2'-O-Methyl-uridine phosphorothioate
  modified_base 99: mod_base = OTHER; note = 2'-O-Methyl-uridine phosphorothioate
  modified_base 100: mod_base = OTHER; note = 2'-O-Methyl-uridine

SEQ ID NO: 2577 - RNA, 103 nt, synthetic construct; identical to SEQ ID NO: 1699
  source 1..103: mol_type = other RNA
  modified_base 1: mod_base = OTHER; note = 2'-O-Methyl-guanosine phosphorothioate
  modified_base 2: mod_base = OTHER; note = 2'-O-Methyl-adenosine phosphorothioate
  modified_base 3: mod_base = OTHER; note = 2'-O-Methyl-guanosine
  modified_base 21: mod_base = OTHER; note = 2'-O-Methyl-guanosine
  modified_base 25: mod_base = OTHER; note = uridine phosphorothioate
  modified_base 28: mod_base = OTHER; note = 2'-O-Methyl-adenosine
  modified_base 29: mod_base = OTHER; note = 2'-O-Methyl-guanosine
  modified_base 30: mod_base = OTHER; note = 2'-O-Methyl-cytidine
  modified_base 31: mod_base = OTHER; note = 2'-O-Methyl-uridine
  modified_base 32: mod_base = OTHER; note = 2'-O-Methyl-adenosine
  modified_base 34: mod_base = OTHER; note = 2'-O-Methyl-adenosine
  modified_base 35: mod_base = OTHER; note = 2'-O-Methyl-adenosine
  modified_base 36: mod_base = OTHER; note = 2'-O-Methyl-adenosine
  modified_base 37: mod_base = OTHER; note = 2'-O-Methyl-uridine
  modified_base 38: mod_base = OTHER; note = 2'-O-Methyl-adenosine
  modified_base 39: mod_base = OTHER; note = 2'-O-Methyl-guanosine
  modified_base 40: mod_base = OTHER; note = 2'-O-Methyl-cytidine
  modified_base 41: mod_base = OTHER; note = 2'-O-Methyl-adenosine
  modified_base 42: mod_base = OTHER; note = 2'-O-Methyl-adenosine
  modified_base 45: mod_base = OTHER; note = uridine phosphorothioate
  modified_base 46: mod_base = OTHER; note = 2'-O-Methyl-adenosine
  modified_base 48: mod_base = OTHER; note = 2'-O-Methyl-adenosine
  modified_base 50: mod_base = OTHER; note = 2'-O-Methyl-uridine
  modified_base 52: mod_base = OTHER; note = 2'-O-Methyl-adenosine
  modified_base 53: mod_base = OTHER; note = 2'-O-Methyl-guanosine
  modified_base 54: mod_base = OTHER; note = 2'-O-Methyl-guanosine
  modified_base 55: mod_base = OTHER; note = 2'-O-Methyl-cytidine
  modified_base 56: mod_base = OTHER; note = 2'-O-Methyl-uridine
  modified_base 57: mod_base = OTHER; note = 2'-O-Methyl-adenosine
  modified_base 60: mod_base = OTHER; note = 2'-O-Methyl-cytidine
  modified_base 61: mod_base = OTHER; note = 2'-O-Methyl-cytidine
  modified_base 64: mod_base = OTHER; note = uridine phosphorothioate
  modified_base 66: mod_base = OTHER; note = 2'-O-Methyl-uridine
  modified_base 67: mod_base = OTHER; note = 2'-O-Methyl-cytidine
  modified_base 70: mod_base = OTHER; note = 2'-O-Methyl-cytidine
  modified_base 71: mod_base = OTHER; note = 2'-O-Methyl-uridine
  modified_base 72: mod_base = OTHER; note = 2'-O-Methyl-uridine
  modified_base 74: mod_base = OTHER; note = 2'-O-Methyl-adenosine
  modified_base 75: mod_base = OTHER; note = 2'-O-Methyl-adenosine
  modified_base 76: mod_base = OTHER; note = 2'-O-Methyl-adenosine
  modified_base 77: mod_base = OTHER; note = 2'-O-Methyl-adenosine
  modified_base 78: mod_base = OTHER; note = 2'-O-Methyl-adenosine
  modified_base 79: mod_base = OTHER; note = 2'-O-Methyl-guanosine
  modified_base 80: mod_base = OTHER; note = 2'-O-Methyl-uridine
  modified_base 81: mod_base = OTHER; note = 2'-O-Methyl-guanosine
  modified_base 83: mod_base = OTHER; note = 2'-O-Methyl-cytidine
  modified_base 84: mod_base = OTHER; note = 2'-O-Methyl-adenosine
  modified_base 85: mod_base = OTHER; note = 2'-O-Methyl-cytidine
  modified_base 86: mod_base = OTHER; note = 2'-O-Methyl-cytidine
  modified_base 87: mod_base = OTHER; note = 2'-O-Methyl-guanosine
  modified_base 88: mod_base = OTHER; note = 2'-O-Methyl-adenosine
  modified_base 89: mod_base = OTHER; note = 2'-O-Methyl-guanosine
  modified_base 90: mod_base = OTHER; note = 2'-O-Methyl-uridine
  modified_base 91: mod_base = OTHER; note = 2'-O-Methyl-cytidine
  modified_base 92: mod_base = OTHER; note = 2'-O-Methyl-guanosine
  modified_base 93: mod_base = OTHER; note = 2'-O-Methyl-guanosine
  modified_base 94: mod_base = OTHER; note = 2'-O-Methyl-uridine
  modified_base 95: mod_base = OTHER; note = 2'-O-Methyl-guanosine
  modified_base 96: mod_base = OTHER; note = 2'-O-Methyl-cytidine
  modified_base 97: mod_base = OTHER; note = 2'-O-Methyl-uridine phosphorothioate
  modified_base 98: mod_base = OTHER; note = 2'-O-Methyl-uridine phosphorothioate
  modified_base 99: mod_base = OTHER; note = 2'-O-Methyl-uridine phosphorothioate
  modified_base 100: mod_base = OTHER; note = 2'-O-Methyl-uridine

SEQ ID NO: 2578 - RNA, 103 nt, synthetic construct; identical to SEQ ID NO: 1700
  source 1..103: mol_type = other RNA
  modified_base 1: mod_base = OTHER; note = 2'-O-Methyl-cytidine phosphorothioate
  modified_base 2: mod_base = OTHER; note = 2'-O-Methyl-adenosine phosphorothioate
  modified_base 3: mod_base = OTHER; note = 2'-O-Methyl-guanosine
  modified_base 21: mod_base = OTHER; note = 2'-O-Methyl-guanosine
  modified_base 25: mod_base = OTHER; note = uridine phosphorothioate
  modified_base 28: mod_base = OTHER; note = 2'-O-Methyl-adenosine
  modified_base 29: mod_base = OTHER; note = 2'-O-Methyl-guanosine
  modified_base 30: mod_base = OTHER; note = 2'-O-Methyl-cytidine
  modified_base 31: mod_base = OTHER; note = 2'-O-Methyl-uridine
  modified_base 32: mod_base = OTHER; note = 2'-O-Methyl-adenosine
  modified_base 33: mod_base = OTHER; note = 2'-O-Methyl-guanosine
  modified_base 34: mod_base = OTHER; note = 2'-O-Methyl-adenosine
  modified_base 35: mod_base = OTHER; note = 2'-O-Methyl-adenosine
  modified_base 36: mod_base = OTHER; note = 2'-O-Methyl-adenosine
  modified_base 37: mod_base = OTHER; note = 2'-O-Methyl-uridine
  modified_base 38: mod_base = OTHER; note = 2'-O-Methyl-adenosine
  modified_base 39: mod_base = OTHER; note = 2'-O-Methyl-guanosine
  modified_base 40: mod_base = OTHER; note = 2'-O-Methyl-cytidine
  modified_base 41: mod_base = OTHER; note = 2'-O-Methyl-adenosine
  modified_base 42: mod_base = OTHER; note = 2'-O-Methyl-adenosine
  modified_base 45: mod_base = OTHER; note = uridine phosphorothioate
  modified_base 46: mod_base = OTHER; note = 2'-O-Methyl-adenosine
  modified_base 48: mod_base = OTHER; note = 2'-O-Methyl-adenosine
  modified_base 50: mod_base = OTHER; note = 2'-O-Methyl-uridine
  modified_base 52: mod_base = OTHER; note = 2'-O-Methyl-adenosine
  modified_base 53: mod_base = OTHER; note = 2'-O-Methyl-guanosine
  modified_base 54: mod_base = OTHER; note = 2'-O-Methyl-guanosine
  modified_base 57: mod_base = OTHER; note = 2'-O-Methyl-adenosine
  modified_base 61: mod_base = OTHER; note = 2'-O-Methyl-cytidine
  modified_base 64: mod_base = OTHER; note = uridine phosphorothioate
  modified_base 66: mod_base = OTHER; note = 2'-O-Methyl-uridine
  modified_base 67: mod_base = OTHER; note = 2'-O-Methyl-cytidine
  modified_base 70: mod_base = OTHER; note = 2'-O-Methyl-cytidine
  modified_base 71: mod_base = OTHER; note = 2'-O-Methyl-uridine
  modified_base 72: mod_base = OTHER; note = 2'-O-Methyl-uridine
  modified_base 74: mod_base = OTHER; note = 2'-O-Methyl-adenosine
  modified_base 75: mod_base = OTHER; note = 2'-O-Methyl-adenosine
  modified_base 76: mod_base = OTHER; note = 2'-O-Methyl-adenosine
  modified_base 77: mod_base = OTHER; note = 2'-O-Methyl-adenosine
  modified_base 78: mod_base = OTHER; note = 2'-O-Methyl-adenosine
  modified_base 79: mod_base = OTHER; note = 2'-O-Methyl-guanosine
  modified_base 80: mod_base = OTHER; note = 2'-O-Methyl-uridine
  modified_base 82: mod_base = OTHER; note = 2'-O-Methyl-guanosine
  modified_base 83: mod_base = OTHER; note = 2'-O-Methyl-cytidine
  modified_base 84: mod_base = OTHER; note = 2'-O-Methyl-adenosine
  modified_base 85: mod_base = OTHER; note = 2'-O-Methyl-cytidine
  modified_base 86: mod_base = OTHER; note = 2'-O-Methyl-cytidine
  modified_base 87: mod_base = OTHER; note = 2'-O-Methyl-guanosine
  modified_base 89: mod_base = OTHER; note = 2'-O-Methyl-guanosine
  modified_base 92: mod_base = OTHER; note = 2'-O-Methyl-guanosine
  modified_base 93: mod_base = OTHER; note = 2'-O-Methyl-guanosine
  modified_base 94: mod_base = OTHER; note = 2'-O-Methyl-uridine
  modified_base 95: mod_base = OTHER; note = 2'-O-Methyl-guanosine
  modified_base 96: mod_base = OTHER; note = 2'-O-Methyl-cytidine
  modified_base 97: mod_base = OTHER; note = 2'-O-Methyl-uridine phosphorothioate
  modified_base 98: mod_base = OTHER; note = 2'-O-Methyl-uridine phosphorothioate
  modified_base 99: mod_base = OTHER; note = 2'-O-Methyl-uridine phosphorothioate
  modified_base 100: mod_base = OTHER; note = 2'-O-Methyl-uridine

SEQ ID NO: 2579 - RNA, 103 nt, synthetic construct; identical to SEQ ID NO: 1700
  source 1..103: mol_type = other RNA
  modified_base 1: mod_base = OTHER; note = 2'-O-Methyl-cytidine phosphorothioate
  modified_base 2: mod_base = OTHER; note = 2'-O-Methyl-adenosine phosphorothioate
  modified_base 3: mod_base = OTHER; note = 2'-O-Methyl-guanosine
  modified_base 21: mod_base = OTHER; note = 2'-O-Methyl-guanosine
  modified_base 25: mod_base = OTHER; note = uridine phosphorothioate
  modified_base 28: mod_base = OTHER; note = 2'-O-Methyl-adenosine
  modified_base 29: mod_base = OTHER; note = 2'-O-Methyl-guanosine
  modified_base 30: mod_base = OTHER; note = 2'-O-Methyl-cytidine
  modified_base 31: mod_base = OTHER; note = 2'-O-Methyl-uridine
  modified_base 32: mod_base = OTHER; note = 2'-O-Methyl-adenosine
  modified_base 33: mod_base = OTHER; note = 2'-O-Methyl-guanosine
  modified_base 34: mod_base = OTHER; note = 2'-O-Methyl-adenosine
  modified_base 35: mod_base = OTHER; note = 2'-O-Methyl-adenosine
  modified_base 36: mod_base = OTHER; note = 2'-O-Methyl-adenosine
  modified_base 37: mod_base = OTHER; note = 2'-O-Methyl-uridine
  modified_base 38: mod_base = OTHER; note = 2'-O-Methyl-adenosine
  modified_base 39: mod_base = OTHER; note = 2'-O-Methyl-guanosine
  modified_base 40: mod_base = OTHER; note = 2'-O-Methyl-cytidine
  modified_base 41: mod_base = OTHER; note = 2'-O-Methyl-adenosine
  modified_base 42: mod_base = OTHER; note = 2'-O-Methyl-adenosine
  modified_base 45: mod_base = OTHER; note = uridine phosphorothioate
  modified_base 46: mod_base = OTHER; note = 2'-O-Methyl-adenosine
  modified_base 48: mod_base = OTHER; note = 2'-O-Methyl-adenosine
  modified_base 50: mod_base = OTHER; note = 2'-O-Methyl-uridine
  modified_base 52: mod_base = OTHER; note = 2'-O-Methyl-adenosine
  modified_base 53: mod_base = OTHER; note = 2'-O-Methyl-guanosine
  modified_base 54: mod_base = OTHER; note = 2'-O-Methyl-guanosine
  modified_base 55: mod_base = OTHER; note = 2'-O-Methyl-cytidine
  modified_base 56: mod_base = OTHER; note = 2'-O-Methyl-uridine
  modified_base 57: mod_base = OTHER; note = 2'-O-Methyl-adenosine
  modified_base 60: mod_base = OTHER; note = 2'-O-Methyl-cytidine
  modified_base 61: mod_base = OTHER; note = 2'-O-Methyl-cytidine
  modified_base 64: mod_base = OTHER; note = uridine phosphorothioate
  modified_base 66: mod_base = OTHER; note = 2'-O-Methyl-uridine
  modified_base 67: mod_base = OTHER; note = 2'-O-Methyl-cytidine
  modified_base 70: mod_base = OTHER; note = 2'-O-Methyl-cytidine
  modified_base 71: mod_base = OTHER; note = 2'-O-Methyl-uridine
  modified_base 72: mod_base = OTHER; note = 2'-O-Methyl-uridine
  modified_base 74: mod_base = OTHER; note = 2'-O-Methyl-adenosine
  modified_base 75: mod_base = OTHER; note = 2'-O-Methyl-adenosine
  modified_base 76: mod_base = OTHER; note = 2'-O-Methyl-adenosine
  modified_base 77: mod_base = OTHER; note = 2'-O-Methyl-adenosine
  modified_base 78: mod_base = OTHER; note = 2'-O-Methyl-adenosine
  modified_base 79: mod_base = OTHER; note = 2'-O-Methyl-guanosine
  modified_base 80: mod_base = OTHER; note = 2'-O-Methyl-uridine
  modified_base 82: mod_base = OTHER; note = 2'-O-Methyl-guanosine
  modified_base 83: mod_base = OTHER; note = 2'-O-Methyl-cytidine
  modified_base 84: mod_base = OTHER; note = 2'-O-Methyl-adenosine
  modified_base 85: mod_base = OTHER; note = 2'-O-Methyl-cytidine
  modified_base 86: mod_base = OTHER; note = 2'-O-Methyl-cytidine
  modified_base 87: mod_base = OTHER; note = 2'-O-Methyl-guanosine
  modified_base 89: mod_base = OTHER; note = 2'-O-Methyl-guanosine
  modified_base 92: mod_base = OTHER; note = 2'-O-Methyl-guanosine
  modified_base 93: mod_base = OTHER; note = 2'-O-Methyl-guanosine
  modified_base 94: mod_base = OTHER; note = 2'-O-Methyl-uridine
  modified_base 95: mod_base = OTHER; note = 2'-O-Methyl-guanosine
  modified_base 96: mod_base = OTHER; note = 2'-O-Methyl-cytidine
  modified_base 97: mod_base = OTHER; note = 2'-O-Methyl-uridine phosphorothioate
  modified_base 98: mod_base = OTHER; note = 2'-O-Methyl-uridine phosphorothioate
  modified_base 99: mod_base = OTHER; note = 2'-O-Methyl-uridine phosphorothioate
  modified_base 100: mod_base = OTHER; note = 2'-O-Methyl-uridine

SEQ ID NO: 2580 - RNA, 103 nt, synthetic construct; identical to SEQ ID NO: 1700
  source 1..103: mol_type = other RNA
  modified_base 1: mod_base = OTHER; note = 2'-O-Methyl-cytidine phosphorothioate
  modified_base 2: mod_base = OTHER; note = 2'-O-Methyl-adenosine phosphorothioate
  modified_base 3: mod_base = OTHER; note = 2'-O-Methyl-guanosine
  modified_base 21: mod_base = OTHER; note = 2'-O-Methyl-guanosine
  modified_base 25: mod_base = OTHER; note = uridine phosphorothioate
  modified_base 28: mod_base = OTHER; note = 2'-O-Methyl-adenosine
  modified_base 29: mod_base = OTHER; note = 2'-O-Methyl-guanosine
  modified_base 30: mod_base = OTHER; note = 2'-O-Methyl-cytidine
  modified_base 31: mod_base = OTHER; note = 2'-O-Methyl-uridine
  modified_base 32: mod_base = OTHER; note = 2'-O-Methyl-adenosine
  modified_base 33: mod_base = OTHER; note = 2'-O-Methyl-guanosine
  modified_base 34: mod_base = OTHER; note = 2'-O-Methyl-adenosine
  modified_base 35: mod_base = OTHER; note = 2'-O-Methyl-adenosine
  modified_base 36: mod_base = OTHER; note = 2'-O-Methyl-adenosine
  modified_base 37: mod_base = OTHER; note = 2'-O-Methyl-uridine
  modified_base 38: mod_base = OTHER; note = 2'-O-Methyl-adenosine
  modified_base 39: mod_base = OTHER; note = 2'-O-Methyl-guanosine
  modified_base 40: mod_base = OTHER; note = 2'-O-Methyl-cytidine
  modified_base 41: mod_base = OTHER; note = 2'-O-Methyl-adenosine
  modified_base 42: mod_base = OTHER; note = 2'-O-Methyl-adenosine
  modified_base 45: mod_base = OTHER; note = uridine phosphorothioate
  modified_base 46: mod_base = OTHER; note = 2'-O-Methyl-adenosine
  modified_base 48: mod_base = OTHER; note = 2'-O-Methyl-adenosine
  modified_base 50: mod_base = OTHER; note = 2'-O-Methyl-uridine
  modified_base 52: mod_base = OTHER; note = 2'-O-Methyl-adenosine
  modified_base 53: mod_base = OTHER; note = 2'-O-Methyl-guanosine
  modified_base 54: mod_base = OTHER; note = 2'-O-Methyl-guanosine
  modified_base 57: mod_base = OTHER; note = 2'-O-Methyl-adenosine
  modified_base 61: mod_base = OTHER; note = 2'-O-Methyl-cytidine
  modified_base 64: mod_base = OTHER; note = uridine phosphorothioate
  modified_base 66: mod_base = OTHER; note = 2'-O-Methyl-uridine
  modified_base 67: mod_base = OTHER; note = 2'-O-Methyl-cytidine
  modified_base 70: mod_base = OTHER; note = 2'-O-Methyl-cytidine
  modified_base 71: mod_base = OTHER; note = 2'-O-Methyl-uridine
  modified_base 72: mod_base = OTHER; note = 2'-O-Methyl-uridine
  modified_base 73: mod_base = OTHER; note = 2'-O-Methyl-guanosine
  modified_base 74: mod_base = OTHER; note = 2'-O-Methyl-adenosine
  modified_base 75: mod_base = OTHER; note = 2'-O-Methyl-adenosine
  modified_base 76: mod_base = OTHER; note = 2'-O-Methyl-adenosine
  modified_base 77: mod_base = OTHER; note = 2'-O-Methyl-adenosine
  modified_base 78: mod_base = OTHER; note = 2'-O-Methyl-adenosine
  modified_base 79: mod_base = OTHER; note = 2'-O-Methyl-guanosine
  modified_base 80: mod_base = OTHER; note = 2'-O-Methyl-uridine
  modified_base 82: mod_base = OTHER; note = 2'-O-Methyl-guanosine
  modified_base 83: mod_base = OTHER; note = 2'-O-Methyl-cytidine
  modified_base 84: mod_base = OTHER; note = 2'-O-Methyl-adenosine
  modified_base 85: mod_base = OTHER; note = 2'-O-Methyl-cytidine
  modified_base 86: mod_base = OTHER; note = 2'-O-Methyl-cytidine
  modified_base 87: mod_base = OTHER; note = 2'-O-Methyl-guanosine
  modified_base 89: mod_base = OTHER; note = 2'-O-Methyl-guanosine
  modified_base 92: mod_base = OTHER; note = 2'-O-Methyl-guanosine
  modified_base 93: mod_base = OTHER; note = 2'-O-Methyl-guanosine
  modified_base 94: mod_base = OTHER; note = 2'-O-Methyl-uridine
  modified_base 95: mod_base = OTHER; note = 2'-O-Methyl-guanosine
  modified_base 96: mod_base = OTHER; note = 2'-O-Methyl-cytidine
  modified_base 97: mod_base = OTHER; note = 2'-O-Methyl-uridine phosphorothioate
  modified_base 98: mod_base = OTHER; note = 2'-O-Methyl-uridine phosphorothioate
  modified_base 99: mod_base = OTHER; note = 2'-O-Methyl-uridine phosphorothioate
  modified_base 100: mod_base = OTHER; note = 2'-O-Methyl-uridine

SEQ ID NO: 2581 - RNA, 103 nt, synthetic construct; identical to SEQ ID NO: 1700
  source 1..103: mol_type = other RNA
  modified_base 1: mod_base = OTHER; note = 2'-O-Methyl-cytidine phosphorothioate
  modified_base 2: mod_base = OTHER; note = 2'-O-Methyl-adenosine phosphorothioate
  modified_base 3: mod_base = OTHER; note = 2'-O-Methyl-guanosine
  modified_base 21: mod_base = OTHER; note = 2'-O-Methyl-guanosine
  modified_base 25: mod_base = OTHER; note = uridine phosphorothioate
  modified_base 28: mod_base = OTHER; note = 2'-O-Methyl-adenosine
  modified_base 29: mod_base = OTHER; note = 2'-O-Methyl-guanosine
  modified_base 30: mod_base = OTHER; note = 2'-O-Methyl-cytidine
  modified_base 31: mod_base = OTHER; note = 2'-O-Methyl-uridine
  modified_base 32: mod_base = OTHER; note = 2'-O-Methyl-adenosine
  modified_base 33: mod_base = OTHER; note = 2'-O-Methyl-guanosine
  modified_base 34: mod_base = OTHER; note = 2'-O-Methyl-adenosine
  modified_base 35: mod_base = OTHER; note = 2'-O-Methyl-adenosine
  modified_base 36: mod_base = OTHER; note = 2'-O-Methyl-adenosine
  modified_base 37: mod_base = OTHER; note = 2'-O-Methyl-uridine
  modified_base 38: mod_base = OTHER; note = 2'-O-Methyl-adenosine
  modified_base 39: mod_base = OTHER; note = 2'-O-Methyl-guanosine
  modified_base 40: mod_base = OTHER; note = 2'-O-Methyl-cytidine
  modified_base 41: mod_base = OTHER; note = 2'-O-Methyl-adenosine
  modified_base 42: mod_base = OTHER; note = 2'-O-Methyl-adenosine
  modified_base 45: mod_base = OTHER; note = uridine phosphorothioate
  modified_base 46: mod_base = OTHER; note = 2'-O-Methyl-adenosine
  modified_base 48: mod_base = OTHER; note = 2'-O-Methyl-adenosine
  modified_base 50: mod_base = OTHER; note = 2'-O-Methyl-uridine
  modified_base 52: mod_base = OTHER; note = 2'-O-Methyl-adenosine
  modified_base 53: mod_base = OTHER; note = 2'-O-Methyl-guanosine
  modified_base 54: mod_base = OTHER; note = 2'-O-Methyl-guanosine
  modified_base 57: mod_base = OTHER; note = 2'-O-Methyl-adenosine
  modified_base 61: mod_base = OTHER; note = 2'-O-Methyl-cytidine
  modified_base 64: mod_base = OTHER; note = uridine phosphorothioate
  modified_base 66: mod_base = OTHER; note = 2'-O-Methyl-uridine
  modified_base 67: mod_base = OTHER; note = 2'-O-Methyl-cytidine
  modified_base 70: mod_base = OTHER; note = 2'-O-Methyl-cytidine
  modified_base 71: mod_base = OTHER; note = 2'-O-Methyl-uridine
  modified_base 72: mod_base = OTHER; note = 2'-O-Methyl-uridine
  modified_base 73: mod_base = OTHER; note = 2'-O-Methyl-guanosine
  modified_base 74: mod_base = OTHER; note = 2'-O-Methyl-adenosine
  modified_base 75: mod_base = OTHER; note = 2'-O-Methyl-adenosine
  modified_base 76: mod_base = OTHER; note = 2'-O-Methyl-adenosine
  modified_base 77: mod_base = OTHER; note = 2'-O-Methyl-adenosine
  modified_base 78: mod_base = OTHER; note = 2'-O-Methyl-adenosine
  modified_base 79: mod_base = OTHER; note = 2'-O-Methyl-guanosine
  modified_base 80: mod_base = OTHER; note = 2'-O-Methyl-uridine
  modified_base 82: mod_base = OTHER; note = 2'-O-Methyl-guanosine
  modified_base 83: mod_base = OTHER; note = 2'-O-Methyl-cytidine
  modified_base 84: mod_base = OTHER; note = 2'-O-Methyl-adenosine
  modified_base 85: mod_base = OTHER; note = 2'-O-Methyl-cytidine
  modified_base 86: mod_base = OTHER; note = 2'-O-Methyl-cytidine
  modified_base 87: mod_base = OTHER; note = 2'-O-Methyl-guanosine
  modified_base 89: mod_base = OTHER; note = 2'-O-Methyl-guanosine
  modified_base 91: mod_base = OTHER; note = 2'-O-Methyl-cytidine
  modified_base 92: mod_base = OTHER; note = 2'-O-Methyl-guanosine
  modified_base 93: mod_base = OTHER; note = 2'-O-Methyl-guanosine
  modified_base 94: mod_base = OTHER; note = 2'-O-Methyl-uridine
  modified_base 95: mod_base = OTHER; note = 2'-O-Methyl-guanosine
  modified_base 96: mod_base = OTHER; note = 2'-O-Methyl-cytidine
  modified_base 97: mod_base = OTHER; note = 2'-O-Methyl-uridine phosphorothioate
  modified_base 98: mod_base = OTHER; note = 2'-O-Methyl-uridine phosphorothioate
  modified_base 99: mod_base = OTHER; note = 2'-O-Methyl-uridine phosphorothioate
  modified_base 100: mod_base = OTHER; note = 2'-O-Methyl-uridine

SEQ ID NO: 2582 - RNA, 103 nt, synthetic construct; identical to SEQ ID NO: 1700
  source 1..103: mol_type = other RNA
  modified_base 1: mod_base = OTHER; note = 2'-O-Methyl-cytidine phosphorothioate
  modified_base 2: mod_base = OTHER; note = 2'-O-Methyl-adenosine phosphorothioate
  modified_base 3: mod_base = OTHER; note = 2'-O-Methyl-guanosine
  modified_base 21: mod_base = OTHER; note = 2'-O-Methyl-guanosine
  modified_base 25: mod_base = OTHER; note = uridine phosphorothioate
  modified_base 28: mod_base = OTHER; note = 2'-O-Methyl-adenosine
  modified_base 29: mod_base = OTHER; note = 2'-O-Methyl-guanosine
  modified_base 30: mod_base = OTHER; note = 2'-O-Methyl-cytidine
  modified_base 31: mod_base = OTHER; note = 2'-O-Methyl-uridine
  modified_base 32: mod_base = OTHER; note = 2'-O-Methyl-adenosine
  modified_base 34: mod_base = OTHER; note = 2'-O-Methyl-adenosine
  modified_base 35: mod_base = OTHER; note = 2'-O-Methyl-adenosine
  modified_base 36: mod_base = OTHER; note = 2'-O-Methyl-adenosine
  modified_base 37: mod_base = OTHER; note = 2'-O-Methyl-uridine
  modified_base 38: mod_base = OTHER; note = 2'-O-Methyl-adenosine
  modified_base 39: mod_base = OTHER; note = 2'-O-Methyl-guanosine
  modified_base 40: mod_base = OTHER; note = 2'-O-Methyl-cytidine
  modified_base 41: mod_base = OTHER; note = 2'-O-Methyl-adenosine
  modified_base 42: mod_base = OTHER; note = 2'-O-Methyl-adenosine
  modified_base 45: mod_base = OTHER; note = uridine phosphorothioate
  modified_base 46: mod_base = OTHER; note = 2'-O-Methyl-adenosine
  modified_base 48: mod_base = OTHER; note = 2'-O-Methyl-adenosine
  modified_base 50: mod_base = OTHER; note = 2'-O-Methyl-uridine
  modified_base 52: mod_base = OTHER; note = 2'-O-Methyl-adenosine
  modified_base 53: mod_base = OTHER; note = 2'-O-Methyl-guanosine
  modified_base 54: mod_base = OTHER; note = 2'-O-Methyl-guanosine
  modified_base 57: mod_base = OTHER; note = 2'-O-Methyl-adenosine
  modified_base 61: mod_base = OTHER; note = 2'-O-Methyl-cytidine
  modified_base 64: mod_base = OTHER; note = uridine phosphorothioate
  modified_base 66: mod_base = OTHER; note = 2'-O-Methyl-uridine
  modified_base 67: mod_base = OTHER; note = 2'-O-Methyl-cytidine
  modified_base 70: mod_base = OTHER; note = 2'-O-Methyl-cytidine
  modified_base 71: mod_base = OTHER; note = 2'-O-Methyl-uridine
  modified_base 72: mod_base = OTHER; note = 2'-O-Methyl-uridine
  modified_base 73: mod_base = OTHER; note = 2'-O-Methyl-guanosine
  modified_base 74: mod_base = OTHER; note = 2'-O-Methyl-adenosine
  modified_base 75: mod_base = OTHER; note = 2'-O-Methyl-adenosine
  modified_base 76: mod_base = OTHER; note = 2'-O-Methyl-adenosine
  modified_base 77: mod_base = OTHER; note = 2'-O-Methyl-adenosine
  modified_base 78: mod_base = OTHER; note = 2'-O-Methyl-adenosine
  modified_base 79: mod_base = OTHER; note = 2'-O-Methyl-guanosine
  modified_base 80: mod_base = OTHER; note = 2'-O-Methyl-uridine
  modified_base 82: mod_base = OTHER; note = 2'-O-Methyl-guanosine
  modified_base 83: mod_base = OTHER; note = 2'-O-Methyl-cytidine
  modified_base 84: mod_base = OTHER; note = 2'-O-Methyl-adenosine
  modified_base 85: mod_base = OTHER; note = 2'-O-Methyl-cytidine
  modified_base 86: mod_base = OTHER; note = 2'-O-Methyl-cytidine
  modified_base 87: mod_base = OTHER; note = 2'-O-Methyl-guanosine
  modified_base 89: mod_base = OTHER; note = 2'-O-Methyl-guanosine
  modified_base 92: mod_base = OTHER; note = 2'-O-Methyl-guanosine
  modified_base 93: mod_base = OTHER; note = 2'-O-Methyl-guanosine
  modified_base 94: mod_base = OTHER; note = 2'-O-Methyl-uridine
  modified_base 95: mod_base = OTHER; note = 2'-O-Methyl-guanosine
  modified_base 96: mod_base = OTHER; note = 2'-O-Methyl-cytidine
  modified_base 97: mod_base = OTHER; note = 2'-O-Methyl-uridine phosphorothioate
  modified_base 98: mod_base = OTHER; note = 2'-O-Methyl-uridine phosphorothioate
  modified_base 99: mod_base = OTHER; note = 2'-O-Methyl-uridine phosphorothioate
  modified_base 100: mod_base = OTHER; note = 2'-O-Methyl-uridine

SEQ ID NO: 2583 - RNA, 103 nt, synthetic construct; identical to SEQ ID NO: 1700
  source 1..103: mol_type = other RNA
  modified_base 1: mod_base = OTHER; note = 2'-O-Methyl-cytidine phosphorothioate
  modified_base 2: mod_base = OTHER; note = 2'-O-Methyl-adenosine phosphorothioate
  modified_base 3: mod_base = OTHER; note = 2'-O-Methyl-guanosine
  modified_base 21: mod_base = OTHER; note = 2'-O-Methyl-guanosine
  modified_base 25: mod_base = OTHER; note = uridine phosphorothioate
  modified_base 28: mod_base = OTHER; note = 2'-O-Methyl-adenosine
  modified_base 29: mod_base = OTHER; note = 2'-O-Methyl-guanosine
  modified_base 30: mod_base = OTHER; note = 2'-O-Methyl-cytidine
  modified_base 31: mod_base = OTHER; note = 2'-O-Methyl-uridine
  modified_base 32: mod_base = OTHER; note = 2'-O-Methyl-adenosine
  modified_base 34: mod_base = OTHER; note = 2'-O-Methyl-adenosine
  modified_base 35: mod_base = OTHER; note = 2'-O-Methyl-adenosine
  modified_base 36: mod_base = OTHER; note = 2'-O-Methyl-adenosine
  modified_base 37: mod_base = OTHER; note = 2'-O-Methyl-uridine
  modified_base 38: mod_base = OTHER; note = 2'-O-Methyl-adenosine
  modified_base 39: mod_base = OTHER; note = 2'-O-Methyl-guanosine
  modified_base 40: mod_base = OTHER; note = 2'-O-Methyl-cytidine
  modified_base 41: mod_base = OTHER; note = 2'-O-Methyl-adenosine
  modified_base 42: mod_base = OTHER; note = 2'-O-Methyl-adenosine
  modified_base 45: mod_base = OTHER; note = uridine phosphorothioate
  modified_base 46: mod_base = OTHER; note = 2'-O-Methyl-adenosine
  modified_base 48: mod_base = OTHER; note = 2'-O-Methyl-adenosine
  modified_base 50: mod_base = OTHER; note = 2'-O-Methyl-uridine
  modified_base 52: mod_base = OTHER; note = 2'-O-Methyl-adenosine
  modified_base 53: mod_base = OTHER; note = 2'-O-Methyl-guanosine
  modified_base 54: mod_base = OTHER; note = 2'-O-Methyl-guanosine
  modified_base 57: mod_base = OTHER; note = 2'-O-Methyl-adenosine
  modified_base 61: mod_base = OTHER; note = 2'-O-Methyl-cytidine
  modified_base 64: mod_base = OTHER; note = uridine phosphorothioate
  modified_base 66: mod_base = OTHER; note = 2'-O-Methyl-uridine
  modified_base 67: mod_base = OTHER; note = 2'-O-Methyl-cytidine
  modified_base 70: mod_base = OTHER; note = 2'-O-Methyl-cytidine
  modified_base 71: mod_base = OTHER; note = 2'-O-Methyl-uridine
  modified_base 72: mod_base = OTHER; note = 2'-O-Methyl-uridine
  modified_base 73: mod_base = OTHER; note = 2'-O-Methyl-guanosine
  modified_base 74: mod_base = OTHER; note = 2'-O-Methyl-adenosine
  modified_base 75: mod_base = OTHER; note = 2'-O-Methyl-adenosine
  modified_base 76: mod_base = OTHER; note = 2'-O-Methyl-adenosine
  modified_base 77: mod_base = OTHER; note = 2'-O-Methyl-adenosine
  modified_base 78: mod_base = OTHER; note = 2'-O-Methyl-adenosine
  modified_base 79: mod_base = OTHER; note = 2'-O-Methyl-guanosine
  modified_base 80: mod_base = OTHER; note = 2'-O-Methyl-uridine
  modified_base 82: mod_base = OTHER; note = 2'-O-Methyl-guanosine
  modified_base 83: mod_base = OTHER; note = 2'-O-Methyl-cytidine
  modified_base 84: mod_base = OTHER; note = 2'-O-Methyl-adenosine
  modified_base 85: mod_base = OTHER; note = 2'-O-Methyl-cytidine
  modified_base 86: mod_base = OTHER; note = 2'-O-Methyl-cytidine
  modified_base 87: mod_base = OTHER; note = 2'-O-Methyl-guanosine
  modified_base 89: mod_base = OTHER; note = 2'-O-Methyl-guanosine
  modified_base 91: mod_base = OTHER; note = 2'-O-Methyl-cytidine
  modified_base 92: mod_base = OTHER; note = 2'-O-Methyl-guanosine
  modified_base 93: mod_base = OTHER; note = 2'-O-Methyl-guanosine
  modified_base 94: mod_base = OTHER; note = 2'-O-Methyl-uridine
  modified_base 95: mod_base = OTHER; note = 2'-O-Methyl-guanosine
  modified_base 96: mod_base = OTHER; note = 2'-O-Methyl-cytidine
  modified_base 97: mod_base = OTHER; note = 2'-O-Methyl-uridine phosphorothioate
  modified_base 98: mod_base = OTHER; note = 2'-O-Methyl-uridine phosphorothioate
  modified_base 99: mod_base = OTHER; note = 2'-O-Methyl-uridine phosphorothioate
  modified_base 100: mod_base = OTHER; note = 2'-O-Methyl-uridine

SEQ ID NO: 2584 - RNA, 103 nt, synthetic construct; identical to SEQ ID NO: 1700
  source 1..103: mol_type = other RNA
  modified_base 1: mod_base = OTHER; note = 2'-O-Methyl-cytidine phosphorothioate
  modified_base 2: mod_base = OTHER; note = 2'-O-Methyl-adenosine phosphorothioate
  modified_base 3: mod_base = OTHER; note = 2'-O-Methyl-guanosine
  modified_base 21: mod_base = OTHER; note = 2'-O-Methyl-guanosine
  modified_base 25: mod_base = OTHER; note = uridine phosphorothioate
  modified_base 28: mod_base = OTHER; note = 2'-O-Methyl-adenosine
  modified_base 29: mod_base = OTHER; note = 2'-O-Methyl-guanosine
  modified_base 30: mod_base = OTHER; note = 2'-O-Methyl-cytidine
  modified_base 31: mod_base = OTHER; note = 2'-O-Methyl-uridine
  modified_base 32: mod_base = OTHER; note = 2'-O-Methyl-adenosine
  modified_base 34: mod_base = OTHER; note = 2'-O-Methyl-adenosine
  modified_base 35: mod_base = OTHER; note = 2'-O-Methyl-adenosine
  modified_base 36: mod_base = OTHER; note = 2'-O-Methyl-adenosine
  modified_base 37: mod_base = OTHER; note = 2'-O-Methyl-uridine
  modified_base 38: mod_base = OTHER; note = 2'-O-Methyl-adenosine
  modified_base 39: mod_base = OTHER; note = 2'-O-Methyl-guanosine
  modified_base 40: mod_base = OTHER; note = 2'-O-Methyl-cytidine
  modified_base 41: mod_base = OTHER; note = 2'-O-Methyl-adenosine
  modified_base 42: mod_base = OTHER; note = 2'-O-Methyl-adenosine
  modified_base 45: mod_base = OTHER; note = uridine phosphorothioate
  modified_base 46: mod_base = OTHER; note = 2'-O-Methyl-adenosine
  modified_base 48: mod_base = OTHER; note = 2'-O-Methyl-adenosine
  modified_base 50: mod_base = OTHER; note = 2'-O-Methyl-uridine
  modified_base 52: mod_base = OTHER; note = 2'-O-Methyl-adenosine
  modified_base 53: mod_base = OTHER; note = 2'-O-Methyl-guanosine
  modified_base 54: mod_base = OTHER; note = 2'-O-Methyl-guanosine
  modified_base 55: mod_base = OTHER; note = 2'-O-Methyl-cytidine
  modified_base 56: mod_base = OTHER; note = 2'-O-Methyl-uridine
  modified_base 57: mod_base = OTHER; note = 2'-O-Methyl-adenosine
  modified_base 60: mod_base = OTHER; note = 2'-O-Methyl-cytidine
  modified_base 61: mod_base = OTHER; note = 2'-O-Methyl-cytidine
  modified_base 64: mod_base = OTHER; note = uridine phosphorothioate
  modified_base 66: mod_base = OTHER; note = 2'-O-Methyl-uridine
  modified_base 67: mod_base = OTHER; note = 2'-O-Methyl-cytidine
  modified_base 70: mod_base = OTHER; note = 2'-O-Methyl-cytidine
  modified_base 71: mod_base = OTHER; note = 2'-O-Methyl-uridine
  modified_base 72: mod_base = OTHER; note = 2'-O-Methyl-uridine
  modified_base 74: mod_base = OTHER; note = 2'-O-Methyl-adenosine
  modified_base 75: mod_base = OTHER; note = 2'-O-Methyl-adenosine
  modified_base 76: mod_base = OTHER; note = 2'-O-Methyl-adenosine
  modified_base 77: mod_base = OTHER; note = 2'-O-Methyl-adenosine
  modified_base 78: mod_base = OTHER; note = 2'-O-Methyl-adenosine
  modified_base 79: mod_base = OTHER; note = 2'-O-Methyl-guanosine
  modified_base 80: mod_base = OTHER; note = 2'-O-Methyl-uridine
  modified_base 82: mod_base = OTHER; note = 2'-O-Methyl-guanosine
  modified_base 83: mod_base = OTHER; note = 2'-O-Methyl-cytidine
  modified_base 84: mod_base = OTHER; note = 2'-O-Methyl-adenosine
  modified_base 85: mod_base = OTHER; note = 2'-O-Methyl-cytidine
  modified_base 86: mod_base = OTHER; note = 2'-O-Methyl-cytidine
  modified_base 87: mod_base = OTHER; note = 2'-O-Methyl-guanosine
  modified_base 89: mod_base = OTHER; note = 2'-O-Methyl-guanosine
  modified_base 92: mod_base = OTHER; note = 2'-O-Methyl-guanosine
  modified_base 93: mod_base = OTHER; note = 2'-O-Methyl-guanosine
  modified_base 94: mod_base = OTHER; note = 2'-O-Methyl-uridine
  modified_base 95: mod_base = OTHER; note = 2'-O-Methyl-guanosine
  modified_base 96: mod_base = OTHER; note = 2'-O-Methyl-cytidine
  modified_base 97: mod_base = OTHER; note = 2'-O-Methyl-uridine phosphorothioate
  modified_base 98: mod_base = OTHER; note = 2'-O-Methyl-uridine phosphorothioate
  modified_base 99: mod_base = OTHER; note = 2'-O-Methyl-uridine phosphorothioate
  modified_base 100: mod_base = OTHER; note = 2'-O-Methyl-uridine

SEQ ID NO: 2585 - RNA, 103 nt, synthetic construct; identical to SEQ ID NO: 1643
  source 1..103: mol_type = other RNA
  modified_base 1: mod_base = OTHER; note = 2'-O-Methyl-cytidine phosphorothioate
  modified_base 2: mod_base = OTHER; note = 2'-O-Methyl-cytidine phosphorothioate
  modified_base 3: mod_base = OTHER; note = 2'-O-Methyl-cytidine phosphorothioate
  modified_base 21: mod_base = OTHER; note = 2'-O-Methyl-guanosine
  modified_base 28: mod_base = OTHER; note = 2'-O-Methyl-adenosine
  modified_base 29: mod_base = OTHER; note = 2'-O-Methyl-guanosine
  modified_base 30: mod_base = OTHER; note = 2'-O-Methyl-cytidine
  modified_base 31: mod_base = OTHER; note = 2'-O-Methyl-uridine
  modified_base 32: mod_base = OTHER; note = 2'-O-Methyl-adenosine
  modified_base 34: mod_base = OTHER; note = 2'-O-Methyl-adenosine
  modified_base 35: mod_base = OTHER; note = 2'-O-Methyl-adenosine
  modified_base 36: mod_base = OTHER; note = 2'-O-Methyl-adenosine
  modified_base 37: mod_base = OTHER; note = 2'-O-Methyl-uridine
  modified_base 38: mod_base = OTHER; note = 2'-O-Methyl-adenosine
  modified_base 39: mod_base = OTHER; note = 2'-O-Methyl-guanosine
  modified_base 40: mod_base = OTHER; note = 2'-O-Methyl-cytidine
  modified_base 41: mod_base = OTHER; note = 2'-O-Methyl-adenosine
  modified_base 42: mod_base = OTHER; note = 2'-O-Methyl-adenosine
  modified_base 46: mod_base = OTHER; note = 2'-O-Methyl-adenosine
  modified_base 48: mod_base = OTHER; note = 2'-O-Methyl-adenosine
  modified_base 50: mod_base = OTHER; note = 2'-O-Methyl-uridine
  modified_base 52: mod_base = OTHER; note = 2'-O-Methyl-adenosine
  modified_base 53: mod_base = OTHER; note = 2'-O-Methyl-guanosine
  modified_base 54: mod_base = OTHER; note = 2'-O-Methyl-guanosine
  modified_base 57: mod_base = OTHER; note = 2'-O-Methyl-adenosine
  modified_base 61: mod_base = OTHER; note = 2'-O-Methyl-cytidine
  modified_base 66: mod_base = OTHER; note = 2'-O-Methyl-uridine
  modified_base 67: mod_base = OTHER; note = 2'-O-Methyl-cytidine
  modified_base 70: mod_base = OTHER; note = 2'-O-Methyl-cytidine
  modified_base 71: mod_base = OTHER; note = 2'-O-Methyl-uridine
  modified_base 72: mod_base = OTHER; note = 2'-O-Methyl-uridine
  modified_base 74: mod_base = OTHER; note = 2'-O-Methyl-adenosine
  modified_base 75: mod_base = OTHER; note = 2'-O-Methyl-adenosine
  modified_base 76: mod_base = OTHER; note = 2'-O-Methyl-adenosine
  modified_base 77: mod_base = OTHER; note = 2'-O-Methyl-adenosine
  modified_base 78: mod_base = OTHER; note = 2'-O-Methyl-adenosine
  modified_base 79: mod_base = OTHER; note = 2'-O-Methyl-guanosine
  modified_base 80: mod_base = OTHER; note = 2'-O-Methyl-uridine
  modified_base 82: mod_base = OTHER; note = 2'-O-Methyl-guanosine
  modified_base 83: mod_base = OTHER; note = 2'-O-Methyl-cytidine
  modified_base 84: mod_base = OTHER; note = 2'-O-Methyl-adenosine
  modified_base 85: mod_base = OTHER; note = 2'-O-Methyl-cytidine
  modified_base 86: mod_base = OTHER; note = 2'-O-Methyl-cytidine
  modified_base 87: mod_base = OTHER; note = 2'-O-Methyl-guanosine
  modified_base 89: mod_base = OTHER; note = 2'-O-Methyl-guanosine
  modified_base 92: mod_base = OTHER; note = 2'-O-Methyl-guanosine
  modified_base 93: mod_base = OTHER; note = 2'-O-Methyl-guanosine
  modified_base 94: mod_base = OTHER; note = 2'-O-Methyl-uridine
  modified_base 95: mod_base = OTHER; note = 2'-O-Methyl-guanosine
  modified_base 96: mod_base = OTHER; note = 2'-O-Methyl-cytidine
  modified_base 97: mod_base = OTHER; note = 2'-O-Methyl-uridine
  modified_base 98: mod_base = OTHER; note = 2'-O-Methyl-uridine phosphorothioate
  modified_base 99: mod_base = OTHER; note = 2'-O-Methyl-uridine phosphorothioate
  modified_base 100: mod_base = OTHER; note = 2'-O-Methyl-uridine

SEQ ID NO: 2586 - RNA, 103 nt, synthetic construct; identical to SEQ ID NO: 1643
  source 1..103: mol_type = other RNA
  modified_base 1: mod_base = OTHER; note = 2'-O-Methyl-cytidine phosphorothioate
  modified_base 2: mod_base = OTHER; note = 2'-O-Methyl-cytidine phosphorothioate
  modified_base 3: mod_base = OTHER; note = 2'-O-Methyl-cytidine phosphorothioate
  modified_base 21: mod_base = OTHER; note = 2'-O-Methyl-guanosine
  modified_base 28: mod_base = OTHER; note = 2'-O-Methyl-adenosine
  modified_base 29: mod_base = OTHER; note = 2'-O-Methyl-guanosine
  modified_base 30: mod_base = OTHER; note = 2'-O-Methyl-cytidine
  modified_base 31: mod_base = OTHER; note = 2'-O-Methyl-uridine
  modified_base 32: mod_base = OTHER; note = 2'-O-Methyl-adenosine
  modified_base 33: mod_base = OTHER; note = 2'-O-Methyl-guanosine
  modified_base 34: mod_base = OTHER; note = 2'-O-Methyl-adenosine
  modified_base 35: mod_base = OTHER; note = 2'-O-Methyl-adenosine
  modified_base 36: mod_base = OTHER; note = 2'-O-Methyl-adenosine
  modified_base 37: mod_base = OTHER; note = 2'-O-Methyl-uridine
  modified_base 38: mod_base = OTHER; note = 2'-O-Methyl-adenosine
  modified_base 39: mod_base = OTHER; note = 2'-O-Methyl-guanosine
  modified_base 40: mod_base = OTHER; note = 2'-O-Methyl-cytidine
  modified_base 41: mod_base = OTHER; note = 2'-O-Methyl-adenosine
  modified_base 42: mod_base = OTHER; note = 2'-O-Methyl-adenosine
  modified_base 46: mod_base = OTHER; note = 2'-O-Methyl-adenosine
  modified_base 48: mod_base = OTHER; note = 2'-O-Methyl-adenosine
  modified_base 50: mod_base = OTHER; note = 2'-O-Methyl-uridine
  modified_base 52: mod_base = OTHER; note = 2'-O-Methyl-adenosine
  modified_base 53: mod_base = OTHER; note = 2'-O-Methyl-guanosine
  modified_base 54: mod_base = OTHER; note = 2'-O-Methyl-guanosine
  modified_base 55: mod_base = OTHER; note = 2'-O-Methyl-cytidine
  modified_base 56: mod_base = OTHER; note = 2'-O-Methyl-uridine
  modified_base 57: mod_base = OTHER; note = 2'-O-Methyl-adenosine
  modified_base 60: mod_base = OTHER; note = 2'-O-Methyl-cytidine
  modified_base 61: mod_base = OTHER; note = 2'-O-Methyl-cytidine
  modified_base 66: mod_base = OTHER; note = 2'-O-Methyl-uridine
  modified_base 67: mod_base = OTHER; note = 2'-O-Methyl-cytidine
  modified_base 70: mod_base = OTHER; note = 2'-O-Methyl-cytidine
  modified_base 71: mod_base = OTHER; note = 2'-O-Methyl-uridine
  modified_base 72: mod_base = OTHER; note = 2'-O-Methyl-uridine
  modified_base 73: mod_base = OTHER; note = 2'-O-Methyl-guanosine
  modified_base 74: mod_base = OTHER; note = 2'-O-Methyl-adenosine
  modified_base 75: mod_base = OTHER; note = 2'-O-Methyl-adenosine
  modified_base 76: mod_base = OTHER; note = 2'-O-Methyl-adenosine
  modified_base 77: mod_base = OTHER; note = 2'-O-Methyl-adenosine
  modified_base 78: mod_base = OTHER; note = 2'-O-Methyl-adenosine
  modified_base 79: mod_base = OTHER; note = 2'-O-Methyl-guanosine
  modified_base 80: mod_base = OTHER; note = 2'-O-Methyl-uridine
  modified_base 81: mod_base = OTHER; note = 2'-O-Methyl-guanosine
  modified_base 83: mod_base = OTHER; note = 2'-O-Methyl-cytidine
  modified_base 84: mod_base = OTHER; note = 2'-O-Methyl-adenosine
  modified_base 85: mod_base = OTHER; note = 2'-O-Methyl-cytidine
  modified_base 86: mod_base = OTHER; note = 2'-O-Methyl-cytidine
  modified_base 87: mod_base = OTHER; note = 2'-O-Methyl-guanosine
  modified_base 88: mod_base = OTHER; note = 2'-O-Methyl-adenosine
  modified_base 89: mod_base = OTHER; note = 2'-O-Methyl-guanosine
  modified_base 90: mod_base = OTHER; note = 2'-O-Methyl-uridine
  modified_base 91: mod_base = OTHER; note = 2'-O-Methyl-cytidine
  modified_base 92: mod_base = OTHER; note = 2'-O-Methyl-guanosine
  modified_base 93: mod_base = OTHER; note = 2'-O-Methyl-guanosine
  modified_base 94: mod_base = OTHER; note = 2'-O-Methyl-uridine
  modified_base 95: mod_base = OTHER; note = 2'-O-Methyl-guanosine
  modified_base 96: mod_base = OTHER; note = 2'-O-Methyl-cytidine
  modified_base 97: mod_base = OTHER; note = 2'-O-Methyl-uridine
  modified_base 98: mod_base = OTHER; note = 2'-O-Methyl-uridine phosphorothioate
  modified_base 99: mod_base = OTHER; note = 2'-O-Methyl-uridine phosphorothioate
  modified_base 100: mod_base = OTHER; note = 2'-O-Methyl-uridine

SEQ ID NO: 2587 - RNA, 103 nt, synthetic construct; identical to SEQ ID NO: 1643
  source 1..103: mol_type = other RNA
  modified_base 1: mod_base = OTHER; note = 2'-O-Methyl-cytidine phosphorothioate
  modified_base 2: mod_base = OTHER; note = 2'-O-Methyl-cytidine phosphorothioate
  modified_base 3: mod_base = OTHER; note = 2'-O-Methyl-cytidine phosphorothioate
  modified_base 21: mod_base = OTHER; note = 2'-O-Methyl-guanosine
  modified_base 28: mod_base = OTHER; note = 2'-O-Methyl-adenosine
  modified_base 29: mod_base = OTHER; note = 2'-O-Methyl-guanosine
  modified_base 30: mod_base = OTHER; note = 2'-O-Methyl-cytidine
  modified_base 31: mod_base = OTHER; note = 2'-O-Methyl-uridine
  modified_base 32: mod_base = OTHER; note = 2'-O-Methyl-adenosine
  modified_base 34: mod_base = OTHER; note = 2'-O-Methyl-adenosine
  modified_base 35: mod_base = OTHER; note = 2'-O-Methyl-adenosine
  modified_base 36: mod_base = OTHER; note = 2'-O-Methyl-adenosine
  modified_base 37: mod_base = OTHER; note = 2'-O-Methyl-uridine
  modified_base 38: mod_base = OTHER; note = 2'-O-Methyl-adenosine
  modified_base 39: mod_base = OTHER; note = 2'-O-Methyl-guanosine
  modified_base 40: mod_base = OTHER; note = 2'-O-Methyl-cytidine
  modified_base 41: mod_base = OTHER; note = 2'-O-Methyl-adenosine
  modified_base 42: mod_base = OTHER; note = 2'-O-Methyl-adenosine
  modified_base 46: mod_base = OTHER; note = 2'-O-Methyl-adenosine
  modified_base 48: mod_base = OTHER; note = 2'-O-Methyl-adenosine
  modified_base 50: mod_base = OTHER; note = 2'-O-Methyl-uridine
  modified_base 52: mod_base = OTHER; note = 2'-O-Methyl-adenosine
  modified_base 53: mod_base = OTHER; note = 2'-O-Methyl-guanosine
  modified_base 54: mod_base = OTHER; note = 2'-O-Methyl-guanosine
  modified_base 55: mod_base = OTHER; note = 2'-O-Methyl-cytidine
  modified_base 56: mod_base = OTHER; note = 2'-O-Methyl-uridine
  modified_base 57: mod_base = OTHER; note = 2'-O-Methyl-adenosine
  modified_base 60: mod_base = OTHER; note = 2'-O-Methyl-cytidine
  modified_base 61: mod_base = OTHER; note = 2'-O-Methyl-cytidine
  modified_base 66: mod_base = OTHER; note = 2'-O-Methyl-uridine
  modified_base 67: mod_base = OTHER; note = 2'-O-Methyl-cytidine
  modified_base 70: mod_base = OTHER; note = 2'-O-Methyl-cytidine
  modified_base 71: mod_base = OTHER; note = 2'-O-Methyl-uridine
  modified_base 72: mod_base = OTHER; note = 2'-O-Methyl-uridine
  modified_base 74: mod_base = OTHER; note = 2'-O-Methyl-adenosine
  modified_base 75: mod_base = OTHER; note = 2'-O-Methyl-adenosine
  modified_base 76: mod_base = OTHER; note = 2'-O-Methyl-adenosine
  modified_base 77: mod_base = OTHER; note = 2'-O-Methyl-adenosine
  modified_base 78: mod_base = OTHER; note = 2'-O-Methyl-adenosine
  modified_base 79: mod_base = OTHER; note = 2'-O-Methyl-guanosine
  modified_base 80: mod_base = OTHER; note = 2'-O-Methyl-uridine
  modified_base 81: mod_base = OTHER; note = 2'-O-Methyl-guanosine
  modified_base 83: mod_base = OTHER; note = 2'-O-Methyl-cytidine
  modified_base 84: mod_base = OTHER; note = 2'-O-Methyl-adenosine
  modified_base 85: mod_base = OTHER; note = 2'-O-Methyl-cytidine
  modified_base 86: mod_base = OTHER; note = 2'-O-Methyl-cytidine
  modified_base 87: mod_base = OTHER; note = 2'-O-Methyl-guanosine
  modified_base 88: mod_base = OTHER; note = 2'-O-Methyl-adenosine
  modified_base 89: mod_base = OTHER; note = 2'-O-Methyl-guanosine
  modified_base 90: mod_base = OTHER; note = 2'-O-Methyl-uridine
  modified_base 91: mod_base = OTHER; note = 2'-O-Methyl-cytidine
  modified_base 92: mod_base = OTHER; note = 2'-O-Methyl-guanosine
  modified_base 93: mod_base = OTHER; note = 2'-O-Methyl-guanosine
  modified_base 94: mod_base = OTHER; note = 2'-O-Methyl-uridine
  modified_base 95: mod_base = OTHER; note = 2'-O-Methyl-guanosine
  modified_base 96: mod_base = OTHER; note = 2'-O-Methyl-cytidine
  modified_base 97: mod_base = OTHER; note = 2'-O-Methyl-uridine
  modified_base 98: mod_base = OTHER; note = 2'-O-Methyl-uridine phosphorothioate
  modified_base 99: mod_base = OTHER; note = 2'-O-Methyl-uridine phosphorothioate
  modified_base 100: mod_base = OTHER; note = 2'-O-Methyl-uridine

SEQ ID NO: 2588 - RNA, 103 nt, synthetic construct; identical to SEQ ID NO: 1699
  source 1..103: mol_type = other RNA
  modified_base 1: mod_base = OTHER; note = 2'-O-Methyl-guanosine phosphorothioate
  modified_base 2: mod_base = OTHER; note = 2'-O-Methyl-adenosine phosphorothioate
  modified_base 3: mod_base = OTHER; note = 2'-O-Methyl-guanosine phosphorothioate
  modified_base 21: mod_base = OTHER; note = 2'-O-Methyl-guanosine
  modified_base 28: mod_base = OTHER; note = 2'-O-Methyl-adenosine
  modified_base 29: mod_base = OTHER; note = 2'-O-Methyl-guanosine
  modified_base 30: mod_base = OTHER; note = 2'-O-Methyl-cytidine
  modified_base 31: mod_base = OTHER; note = 2'-O-Methyl-uridine
  modified_base 32: mod_base = OTHER; note = 2'-O-Methyl-adenosine
  modified_base 33: mod_base = OTHER; note = 2'-O-Methyl-guanosine
  modified_base 34: mod_base = OTHER; note = 2'-O-Methyl-adenosine
  modified_base 35: mod_base = OTHER; note = 2'-O-Methyl-adenosine
  modified_base 36: mod_base = OTHER; note = 2'-O-Methyl-adenosine
  modified_base 37: mod_base = OTHER; note = 2'-O-Methyl-uridine
  modified_base 38: mod_base = OTHER; note = 2'-O-Methyl-adenosine
  modified_base 39: mod_base = OTHER; note = 2'-O-Methyl-guanosine
  modified_base 40: mod_base = OTHER; note = 2'-O-Methyl-cytidine
  modified_base 41: mod_base = OTHER; note = 2'-O-Methyl-adenosine
  modified_base 42: mod_base = OTHER; note = 2'-O-Methyl-adenosine
  modified_base 46: mod_base = OTHER; note = 2'-O-Methyl-adenosine
  modified_base 48: mod_base = OTHER; note = 2'-O-Methyl-adenosine
  modified_base 50: mod_base = OTHER; note = 2'-O-Methyl-uridine
  modified_base 52: mod_base = OTHER; note = 2'-O-Methyl-adenosine
  modified_base 53: mod_base = OTHER; note = 2'-O-Methyl-guanosine
  modified_base 54: mod_base = OTHER; note = 2'-O-Methyl-guanosine
  modified_base 55: mod_base = OTHER; note = 2'-O-Methyl-cytidine
  modified_base 56: mod_base = OTHER; note = 2'-O-Methyl-uridine
  modified_base 57: mod_base = OTHER; note = 2'-O-Methyl-adenosine
  modified_base 60: mod_base = OTHER; note = 2'-O-Methyl-cytidine
  modified_base 61: mod_base = OTHER; note = 2'-O-Methyl-cytidine
  modified_base 66: mod_base = OTHER; note = 2'-O-Methyl-uridine
  modified_base 67: mod_base = OTHER; note = 2'-O-Methyl-cytidine
  modified_base 70: mod_base = OTHER; note = 2'-O-Methyl-cytidine
  modified_base 71: mod_base = OTHER; note = 2'-O-Methyl-uridine
  modified_base 72: mod_base = OTHER; note = 2'-O-Methyl-uridine
  modified_base 73: mod_base = OTHER; note = 2'-O-Methyl-guanosine
  modified_base 74: mod_base = OTHER; note = 2'-O-Methyl-adenosine
  modified_base 75: mod_base = OTHER; note = 2'-O-Methyl-adenosine
  modified_base 76: mod_base = OTHER; note = 2'-O-Methyl-adenosine
  modified_base 77: mod_base = OTHER; note = 2'-O-Methyl-adenosine
  modified_base 78: mod_base = OTHER; note = 2'-O-Methyl-adenosine
  modified_base 79: mod_base = OTHER; note = 2'-O-Methyl-guanosine
  modified_base 80: mod_base = OTHER; note = 2'-O-Methyl-uridine
  modified_base 81: mod_base = OTHER; note = 2'-O-Methyl-guanosine
  modified_base 83: mod_base = OTHER; note = 2'-O-Methyl-cytidine
  modified_base 84: mod_base = OTHER; note = 2'-O-Methyl-adenosine
  modified_base 85: mod_base = OTHER; note = 2'-O-Methyl-cytidine
  modified_base 86: mod_base = OTHER; note = 2'-O-Methyl-cytidine
  modified_base 87: mod_base = OTHER; note = 2'-O-Methyl-guanosine
  modified_base 88: mod_base = OTHER; note = 2'-O-Methyl-adenosine
  modified_base 89: mod_base = OTHER; note = 2'-O-Methyl-guanosine
  modified_base 90: mod_base = OTHER; note = 2'-O-Methyl-uridine
  modified_base 91: mod_base = OTHER; note = 2'-O-Methyl-cytidine
  modified_base 92: mod_base = OTHER; note = 2'-O-Methyl-guanosine
  modified_base 93: mod_base = OTHER; note = 2'-O-Methyl-guanosine
  modified_base 94: mod_base = OTHER; note = 2'-O-Methyl-uridine
  modified_base 95: mod_base = OTHER; note = 2'-O-Methyl-guanosine
  modified_base 96: mod_base = OTHER; note = 2'-O-Methyl-cytidine
  modified_base 97: mod_base = OTHER; note = 2'-O-Methyl-uridine
  modified_base 98: mod_base = OTHER; note = 2'-O-Methyl-uridine phosphorothioate
  modified_base 99: mod_base = OTHER; note = 2'-O-Methyl-uridine phosphorothioate
  modified_base 100: mod_base = OTHER; note = 2'-O-Methyl-uridine

SEQ ID NO: 2589 - RNA, 103 nt, synthetic construct; identical to SEQ ID NO: 1699
  source 1..103: mol_type = other RNA
  modified_base 1: mod_base = OTHER; note = 2'-O-Methyl-guanosine phosphorothioate
  modified_base 2: mod_base = OTHER; note = 2'-O-Methyl-adenosine phosphorothioate
  modified_base 3: mod_base = OTHER; note = 2'-O-Methyl-guanosine phosphorothioate
  modified_base 21: mod_base = OTHER; note = 2'-O-Methyl-guanosine
  modified_base 28: mod_base = OTHER; note = 2'-O-Methyl-adenosine
  modified_base 29: mod_base = OTHER; note = 2'-O-Methyl-guanosine
  modified_base 30: mod_base = OTHER; note = 2'-O-Methyl-cytidine
  modified_base 31: mod_base = OTHER; note = 2'-O-Methyl-uridine
  modified_base 32: mod_base = OTHER; note = 2'-O-Methyl-adenosine
  modified_base 34: mod_base = OTHER; note = 2'-O-Methyl-adenosine
  modified_base 35: mod_base = OTHER; note = 2'-O-Methyl-adenosine
  modified_base 36: mod_base = OTHER; note = 2'-O-Methyl-adenosine
  modified_base 37: mod_base = OTHER; note = 2'-O-Methyl-uridine
  modified_base 38: mod_base = OTHER; note = 2'-O-Methyl-adenosine
  modified_base 39: mod_base = OTHER; note = 2'-O-Methyl-guanosine
  modified_base 40: mod_base = OTHER; note = 2'-O-Methyl-cytidine
  modified_base 41: mod_base = OTHER; note = 2'-O-Methyl-adenosine
  modified_base 42: mod_base = OTHER; note = 2'-O-Methyl-adenosine
  modified_base 46: mod_base = OTHER; note = 2'-O-Methyl-adenosine
  modified_base 48: mod_base = OTHER; note = 2'-O-Methyl-adenosine
  modified_base 50: mod_base = OTHER; note = 2'-O-Methyl-uridine
  modified_base 52: mod_base = OTHER; note = 2'-O-Methyl-adenosine
  modified_base 53: mod_base = OTHER; note = 2'-O-Methyl-guanosine
  modified_base 54: mod_base = OTHER; note = 2'-O-Methyl-guanosine
  modified_base 55: mod_base = OTHER; note = 2'-O-Methyl-cytidine
  modified_base 56: mod_base = OTHER; note = 2'-O-Methyl-uridine
  modified_base 57: mod_base = OTHER; note = 2'-O-Methyl-adenosine
  modified_base 60: mod_base = OTHER; note = 2'-O-Methyl-cytidine
  modified_base 61: mod_base = OTHER; note = 2'-O-Methyl-cytidine
  modified_base 66: mod_base = OTHER; note = 2'-O-Methyl-uridine
  modified_base 67: mod_base = OTHER; note = 2'-O-Methyl-cytidine
  modified_base 70: mod_base = OTHER; note = 2'-O-Methyl-cytidine
  modified_base 71: mod_base = OTHER; note = 2'-O-Methyl-uridine
  modified_base 72: mod_base = OTHER; note = 2'-O-Methyl-uridine
  modified_base 74: mod_base = OTHER; note = 2'-O-Methyl-adenosine
  modified_base 75: mod_base = OTHER; note = 2'-O-Methyl-adenosine
  modified_base 76: mod_base = OTHER; note = 2'-O-Methyl-adenosine
  modified_base 77: mod_base = OTHER; note = 2'-O-Methyl-adenosine
  modified_base 78: mod_base = OTHER; note = 2'-O-Methyl-adenosine
  modified_base 79: mod_base = OTHER; note = 2'-O-Methyl-guanosine
  modified_base 80: mod_base = OTHER; note = 2'-O-Methyl-uridine
  modified_base 81: mod_base = OTHER; note = 2'-O-Methyl-guanosine
  modified_base 83: mod_base = OTHER; note = 2'-O-Methyl-cytidine
  modified_base 84: mod_base = OTHER; note = 2'-O-Methyl-adenosine
  modified_base 85: mod_base = OTHER; note = 2'-O-Methyl-cytidine
  modified_base 86: mod_base = OTHER; note = 2'-O-Methyl-cytidine
  modified_base 87: mod_base = OTHER; note = 2'-O-Methyl-guanosine
  modified_base 88: mod_base = OTHER; note = 2'-O-Methyl-adenosine
  modified_base 89: mod_base = OTHER; note = 2'-O-Methyl-guanosine
  modified_base 90: mod_base = OTHER; note = 2'-O-Methyl-uridine
  modified_base 91: mod_base = OTHER; note = 2'-O-Methyl-cytidine
  modified_base 92: mod_base = OTHER; note = 2'-O-Methyl-guanosine
  modified_base 93: mod_base = OTHER; note = 2'-O-Methyl-guanosine
  modified_base 94: mod_base = OTHER; note = 2'-O-Methyl-uridine
  modified_base 95: mod_base = OTHER; note = 2'-O-Methyl-guanosine
  modified_base 96: mod_base = OTHER; note = 2'-O-Methyl-cytidine
  modified_base 97: mod_base = OTHER; note = 2'-O-Methyl-uridine
  modified_base 98: mod_base = OTHER; note = 2'-O-Methyl-uridine phosphorothioate
  modified_base 99: mod_base = OTHER; note = 2'-O-Methyl-uridine phosphorothioate
  modified_base 100: mod_base = OTHER; note = 2'-O-Methyl-uridine

SEQ ID NO: 2590 - RNA, 103 nt, synthetic construct; identical to SEQ ID NO: 1700
  source 1..103: mol_type = other RNA
  modified_base 1: mod_base = OTHER; note = 2'-O-Methyl-cytidine phosphorothioate
  modified_base 2: mod_base = OTHER; note = 2'-O-Methyl-adenosine phosphorothioate
  modified_base 3: mod_base = OTHER; note = 2'-O-Methyl-guanosine phosphorothioate
  modified_base 21: mod_base = OTHER; note = 2'-O-Methyl-guanosine
  modified_base 28: mod_base = OTHER; note = 2'-O-Methyl-adenosine
  modified_base 29: mod_base = OTHER; note = 2'-O-Methyl-guanosine
  modified_base 30: mod_base = OTHER; note = 2'-O-Methyl-cytidine
  modified_base 31: mod_base = OTHER; note = 2'-O-Methyl-uridine
  modified_base 32: mod_base = OTHER; note = 2'-O-Methyl-adenosine
  modified_base 34: mod_base = OTHER; note = 2'-O-Methyl-adenosine
  modified_base 35: mod_base = OTHER; note = 2'-O-Methyl-adenosine
  modified_base 36: mod_base = OTHER; note = 2'-O-Methyl-adenosine
  modified_base 37: mod_base = OTHER; note = 2'-O-Methyl-uridine
  modified_base 38: mod_base = OTHER; note = 2'-O-Methyl-adenosine
  modified_base 39: mod_base = OTHER; note = 2'-O-Methyl-guanosine
  modified_base 40: mod_base = OTHER; note = 2'-O-Methyl-cytidine
  modified_base 41: mod_base = OTHER; note = 2'-O-Methyl-adenosine
  modified_base 42: mod_base = OTHER; note = 2'-O-Methyl-adenosine
  modified_base 46: mod_base = OTHER; note = 2'-O-Methyl-adenosine
  modified_base 48: mod_base = OTHER; note = 2'-O-Methyl-adenosine
  modified_base 50: mod_base = OTHER; note = 2'-O-Methyl-uridine
  modified_base 52: mod_base = OTHER; note = 2'-O-Methyl-adenosine
  modified_base 53: mod_base = OTHER; note = 2'-O-Methyl-guanosine
  modified_base 54: mod_base = OTHER; note = 2'-O-Methyl-guanosine
  modified_base 55: mod_base = OTHER; note = 2'-O-Methyl-cytidine
  modified_base 56: mod_base = OTHER; note = 2'-O-Methyl-uridine
  modified_base 57: mod_base = OTHER; note = 2'-O-Methyl-adenosine
  modified_base 60: mod_base = OTHER; note = 2'-O-Methyl-cytidine
  modified_base 61: mod_base = OTHER; note = 2'-O-Methyl-cytidine
  modified_base 66: mod_base = OTHER; note = 2'-O-Methyl-uridine
  modified_base 67: mod_base = OTHER; note = 2'-O-Methyl-cytidine
  modified_base 70: mod_base = OTHER; note = 2'-O-Methyl-cytidine
  modified_base 71: mod_base = OTHER; note = 2'-O-Methyl-uridine
  modified_base 72: mod_base = OTHER; note = 2'-O-Methyl-uridine
  modified_base 74: mod_base = OTHER; note = 2'-O-Methyl-adenosine
  modified_base 75: mod_base = OTHER; note = 2'-O-Methyl-adenosine
  modified_base 76: mod_base = OTHER; note = 2'-O-Methyl-adenosine
  modified_base 77: mod_base = OTHER; note = 2'-O-Methyl-adenosine
  modified_base 78: mod_base = OTHER; note = 2'-O-Methyl-adenosine
  modified_base 79: mod_base = OTHER; note = 2'-O-Methyl-guanosine
  modified_base 80: mod_base = OTHER; note = 2'-O-Methyl-uridine
  modified_base 81: mod_base = OTHER; note = 2'-O-Methyl-guanosine
  modified_base 83: mod_base = OTHER; note = 2'-O-Methyl-cytidine
  modified_base 84: mod_base = OTHER; note = 2'-O-Methyl-adenosine
  modified_base 85: mod_base = OTHER; note = 2'-O-Methyl-cytidine
  modified_base 86: mod_base = OTHER; note = 2'-O-Methyl-cytidine
  modified_base 87: mod_base = OTHER; note = 2'-O-Methyl-guanosine
  modified_base 88: mod_base = OTHER; note = 2'-O-Methyl-adenosine
  modified_base 89: mod_base = OTHER; note = 2'-O-Methyl-guanosine
  modified_base 90: mod_base = OTHER; note = 2'-O-Methyl-uridine
  modified_base 91: mod_base = OTHER; note = 2'-O-Methyl-cytidine
  modified_base 92: mod_base = OTHER; note = 2'-O-Methyl-guanosine
  modified_base 93: mod_base = OTHER; note = 2'-O-Methyl-guanosine
  modified_base 94: mod_base = OTHER; note = 2'-O-Methyl-uridine
  modified_base 95: mod_base = OTHER; note = 2'-O-Methyl-guanosine
  modified_base 96: mod_base = OTHER; note = 2'-O-Methyl-cytidine
  modified_base 97: mod_base = OTHER; note = 2'-O-Methyl-uridine
  modified_base 98: mod_base = OTHER; note = 2'-O-Methyl-uridine phosphorothioate
  modified_base 99: mod_base = OTHER; note = 2'-O-Methyl-uridine phosphorothioate
  modified_base 100: mod_base = OTHER; note = 2'-O-Methyl-uridine

SEQ ID NO: 2591 - RNA, 103 nt, synthetic construct; identical to SEQ ID NO: 1700
  source 1..103: mol_type = other RNA
  modified_base 1: mod_base = OTHER; note = 2'-O-Methyl-cytidine phosphorothioate
  modified_base 2: mod_base = OTHER; note = 2'-O-Methyl-adenosine phosphorothioate
  modified_base 3: mod_base = OTHER; note = 2'-O-Methyl-guanosine phosphorothioate
  modified_base 21: mod_base = OTHER; note = 2'-O-Methyl-guanosine
  modified_base 28: mod_base = OTHER; note = 2'-O-Methyl-adenosine
  modified_base 29: mod_base = OTHER; note = 2'-O-Methyl-guanosine
  modified_base 30: mod_base = OTHER; note = 2'-O-Methyl-cytidine
  modified_base 31: mod_base = OTHER; note = 2'-O-Methyl-uridine
  modified_base 32: mod_base = OTHER; note = 2'-O-Methyl-adenosine
  modified_base 33: mod_base = OTHER; note = 2'-O-Methyl-guanosine
  modified_base 34: mod_base = OTHER; note = 2'-O-Methyl-adenosine
  modified_base 35: mod_base = OTHER; note = 2'-O-Methyl-adenosine
  modified_base 36: mod_base = OTHER; note = 2'-O-Methyl-adenosine
  modified_base 37: mod_base = OTHER; note = 2'-O-Methyl-uridine
  modified_base 38: mod_base = OTHER; note = 2'-O-Methyl-adenosine
  modified_base 39: mod_base = OTHER; note = 2'-O-Methyl-guanosine
  modified_base 40: mod_base = OTHER; note = 2'-O-Methyl-cytidine
  modified_base 41: mod_base = OTHER; note = 2'-O-Methyl-adenosine
  modified_base 42: mod_base = OTHER; note = 2'-O-Methyl-adenosine
  modified_base 46: mod_base = OTHER; note = 2'-O-Methyl-adenosine
  modified_base 48: mod_base = OTHER; note = 2'-O-Methyl-adenosine
  modified_base 50: mod_base = OTHER; note = 2'-O-Methyl-uridine
  modified_base 52: mod_base = OTHER; note = 2'-O-Methyl-adenosine
  modified_base 53: mod_base = OTHER; note = 2'-O-Methyl-guanosine
  modified_base 54: mod_base = OTHER; note = 2'-O-Methyl-guanosine
  modified_base 57: mod_base = OTHER; note = 2'-O-Methyl-adenosine
  modified_base 61: mod_base = OTHER; note = 2'-O-Methyl-cytidine
  modified_base 66: mod_base = OTHER; note = 2'-O-Methyl-uridine
  modified_base 67: mod_base = OTHER; note = 2'-O-Methyl-cytidine
  modified_base 70: mod_base = OTHER; note = 2'-O-Methyl-cytidine
  modified_base 71: mod_base = OTHER; note = 2'-O-Methyl-uridine
  modified_base 72: mod_base = OTHER; note = 2'-O-Methyl-uridine
  modified_base 74: mod_base = OTHER; note = 2'-O-Methyl-adenosine
  modified_base 75: mod_base = OTHER; note = 2'-O-Methyl-adenosine
  modified_base 76: mod_base = OTHER; note = 2'-O-Methyl-adenosine
  modified_base 77: mod_base = OTHER; note = 2'-O-Methyl-adenosine
  modified_base 78: mod_base = OTHER; note = 2'-O-Methyl-adenosine
  modified_base 79: mod_base = OTHER; note = 2'-O-Methyl-guanosine
  modified_base 80: mod_base = OTHER; note = 2'-O-Methyl-uridine
  modified_base 82: mod_base = OTHER; note = 2'-O-Methyl-guanosine
  modified_base 83: mod_base = OTHER; note = 2'-O-Methyl-cytidine
  modified_base 84: mod_base = OTHER; note = 2'-O-Methyl-adenosine
  modified_base 85: mod_base = OTHER; note = 2'-O-Methyl-cytidine
  modified_base 86: mod_base = OTHER; note = 2'-O-Methyl-cytidine
  modified_base 87: mod_base = OTHER; note = 2'-O-Methyl-guanosine
  modified_base 89: mod_base = OTHER; note = 2'-O-Methyl-guanosine
  modified_base 92: mod_base = OTHER; note = 2'-O-Methyl-guanosine
  modified_base 93: mod_base = OTHER; note = 2'-O-Methyl-guanosine
  modified_base 94: mod_base = OTHER; note = 2'-O-Methyl-uridine
  modified_base 95: mod_base = OTHER; note = 2'-O-Methyl-guanosine
  modified_base 96: mod_base = OTHER; note = 2'-O-Methyl-cytidine
  modified_base 97: mod_base = OTHER; note = 2'-O-Methyl-uridine
  modified_base 98: mod_base = OTHER; note = 2'-O-Methyl-uridine phosphorothioate
  modified_base 99: mod_base = OTHER; note = 2'-O-Methyl-uridine phosphorothioate
  modified_base 100: mod_base = OTHER; note = 2'-O-Methyl-uridine

SEQ ID NO: 2592 - RNA, 103 nt, synthetic construct; identical to SEQ ID NO: 1700
  source 1..103: mol_type = other RNA
  modified_base 1: mod_base = OTHER; note = 2'-O-Methyl-cytidine phosphorothioate
  modified_base 2: mod_base = OTHER; note = 2'-O-Methyl-adenosine phosphorothioate
  modified_base 3: mod_base = OTHER; note = 2'-O-Methyl-guanosine phosphorothioate
  modified_base 21: mod_base = OTHER; note = 2'-O-Methyl-guanosine
  modified_base 28: mod_base = OTHER; note = 2'-O-Methyl-adenosine
  modified_base 29: mod_base = OTHER; note = 2'-O-Methyl-guanosine
  modified_base 30: mod_base = OTHER; note = 2'-O-Methyl-cytidine
  modified_base 31: mod_base = OTHER; note = 2'-O-Methyl-uridine
  modified_base 32: mod_base = OTHER; note = 2'-O-Methyl-adenosine
  modified_base 33: mod_base = OTHER; note = 2'-O-Methyl-guanosine
  modified_base 34: mod_base = OTHER; note = 2'-O-Methyl-adenosine
  modified_base 35: mod_base = OTHER; note = 2'-O-Methyl-adenosine
  modified_base 36: mod_base = OTHER; note = 2'-O-Methyl-adenosine
  modified_base 37: mod_base = OTHER; note = 2'-O-Methyl-uridine
  modified_base 38: mod_base = OTHER; note = 2'-O-Methyl-adenosine
  modified_base 39: mod_base = OTHER; note = 2'-O-Methyl-guanosine
  modified_base 40: mod_base = OTHER; note = 2'-O-Methyl-cytidine
  modified_base 41: mod_base = OTHER; note = 2'-O-Methyl-adenosine
  modified_base 42: mod_base = OTHER; note = 2'-O-Methyl-adenosine
  modified_base 46: mod_base = OTHER; note = 2'-O-Methyl-adenosine
  modified_base 48: mod_base = OTHER; note = 2'-O-Methyl-adenosine
  modified_base 50: mod_base = OTHER; note = 2'-O-Methyl-uridine
  modified_base 52: mod_base = OTHER; note = 2'-O-Methyl-adenosine
  modified_base 53: mod_base = OTHER; note = 2'-O-Methyl-guanosine
  modified_base 54: mod_base = OTHER; note = 2'-O-Methyl-guanosine
  modified_base 55: mod_base = OTHER; note = 2'-O-Methyl-cytidine
  modified_base 56: mod_base = OTHER; note = 2'-O-Methyl-uridine
  modified_base 57: mod_base = OTHER; note = 2'-O-Methyl-adenosine
  modified_base 60: mod_base = OTHER; note = 2'-O-Methyl-cytidine
  modified_base 61: mod_base = OTHER; note = 2'-O-Methyl-cytidine
  modified_base 66: mod_base = OTHER; note = 2'-O-Methyl-uridine
  modified_base 67: mod_base = OTHER; note = 2'-O-Methyl-cytidine
  modified_base 70: mod_base = OTHER; note = 2'-O-Methyl-cytidine
  modified_base 71: mod_base = OTHER; note = 2'-O-Methyl-uridine
  modified_base 72: mod_base = OTHER; note = 2'-O-Methyl-uridine
  modified_base 74: mod_base = OTHER; note = 2'-O-Methyl-adenosine
  modified_base 75: mod_base = OTHER; note = 2'-O-Methyl-adenosine
  modified_base 76: mod_base = OTHER; note = 2'-O-Methyl-adenosine
  modified_base 77: mod_base = OTHER; note = 2'-O-Methyl-adenosine
  modified_base 78: mod_base = OTHER; note = 2'-O-Methyl-adenosine
  modified_base 79: mod_base = OTHER; note = 2'-O-Methyl-guanosine
  modified_base 80: mod_base = OTHER; note = 2'-O-Methyl-uridine
  modified_base 82: mod_base = OTHER; note = 2'-O-Methyl-guanosine
  modified_base 83: mod_base = OTHER; note = 2'-O-Methyl-cytidine
  modified_base 84: mod_base = OTHER; note = 2'-O-Methyl-adenosine
  modified_base 85: mod_base = OTHER; note = 2'-O-Methyl-cytidine
  modified_base 86: mod_base = OTHER; note = 2'-O-Methyl-cytidine
  modified_base 87: mod_base = OTHER; note = 2'-O-Methyl-guanosine
  modified_base 89: mod_base = OTHER; note = 2'-O-Methyl-guanosine
  modified_base 92: mod_base = OTHER; note = 2'-O-Methyl-guanosine
  modified_base 93: mod_base = OTHER; note = 2'-O-Methyl-guanosine
  modified_base 94: mod_base = OTHER; note = 2'-O-Methyl-uridine
  modified_base 95: mod_base = OTHER; note = 2'-O-Methyl-guanosine
  modified_base 96: mod_base = OTHER; note = 2'-O-Methyl-cytidine
  modified_base 97: mod_base = OTHER; note = 2'-O-Methyl-uridine
  modified_base 98: mod_base = OTHER; note = 2'-O-Methyl-uridine phosphorothioate
  modified_base 99: mod_base = OTHER; note = 2'-O-Methyl-uridine phosphorothioate
  modified_base 100: mod_base = OTHER; note = 2'-O-Methyl-uridine

SEQ ID NO: 2593 - RNA, 103 nt, synthetic construct; identical to SEQ ID NO: 1700
  source 1..103: mol_type = other RNA
  modified_base 1: mod_base = OTHER; note = 2'-O-Methyl-cytidine phosphorothioate
  modified_base 2: mod_base = OTHER; note = 2'-O-Methyl-adenosine phosphorothioate
  modified_base 3: mod_base = OTHER; note = 2'-O-Methyl-guanosine phosphorothioate
  modified_base 21: mod_base = OTHER; note = 2'-O-Methyl-guanosine
  modified_base 28: mod_base = OTHER; note = 2'-O-Methyl-adenosine
  modified_base 29: mod_base = OTHER; note = 2'-O-Methyl-guanosine
  modified_base 30: mod_base = OTHER; note = 2'-O-Methyl-cytidine
  modified_base 31: mod_base = OTHER; note = 2'-O-Methyl-uridine
  modified_base 32: mod_base = OTHER; note = 2'-O-Methyl-adenosine
  modified_base 33: mod_base = OTHER; note = 2'-O-Methyl-guanosine
  modified_base 34: mod_base = OTHER; note = 2'-O-Methyl-adenosine
  modified_base 35: mod_base = OTHER; note = 2'-O-Methyl-adenosine
  modified_base 36: mod_base = OTHER; note = 2'-O-Methyl-adenosine
  modified_base 37: mod_base = OTHER; note = 2'-O-Methyl-uridine
  modified_base 38: mod_base = OTHER; note = 2'-O-Methyl-adenosine
  modified_base 39: mod_base = OTHER; note = 2'-O-Methyl-guanosine
  modified_base 40: mod_base = OTHER; note = 2'-O-Methyl-cytidine
  modified_base 41: mod_base = OTHER; note = 2'-O-Methyl-adenosine
  modified_base 42: mod_base = OTHER; note = 2'-O-Methyl-adenosine
  modified_base 46: mod_base = OTHER; note = 2'-O-Methyl-adenosine
  modified_base 48: mod_base = OTHER; note = 2'-O-Methyl-adenosine
  modified_base 50: mod_base = OTHER; note = 2'-O-Methyl-uridine
  modified_base 52: mod_base = OTHER; note = 2'-O-Methyl-adenosine
  modified_base 53: mod_base = OTHER; note = 2'-O-Methyl-guanosine
  modified_base 54: mod_base = OTHER; note = 2'-O-Methyl-guanosine
  modified_base 57: mod_base = OTHER; note = 2'-O-Methyl-adenosine
  modified_base 61: mod_base = OTHER; note = 2'-O-Methyl-cytidine
  modified_base 66: mod_base = OTHER; note = 2'-O-Methyl-uridine
  modified_base 67: mod_base = OTHER; note = 2'-O-Methyl-cytidine
  modified_base 70: mod_base = OTHER; note = 2'-O-Methyl-cytidine
  modified_base 71: mod_base = OTHER; note = 2'-O-Methyl-uridine
  modified_base 72: mod_base = OTHER; note = 2'-O-Methyl-uridine
  modified_base 73: mod_base = OTHER; note = 2'-O-Methyl-guanosine
  modified_base 74: mod_base = OTHER; note = 2'-O-Methyl-adenosine
  modified_base 75: mod_base = OTHER; note = 2'-O-Methyl-adenosine
  modified_base 76: mod_base = OTHER; note = 2'-O-Methyl-adenosine
  modified_base 77: mod_base = OTHER; note = 2'-O-Methyl-adenosine
  modified_base 78: mod_base = OTHER; note = 2'-O-Methyl-adenosine
  modified_base 79: mod_base = OTHER; note = 2'-O-Methyl-guanosine
  modified_base 80: mod_base = OTHER; note = 2'-O-Methyl-uridine
  modified_base 82: mod_base = OTHER; note = 2'-O-Methyl-guanosine
  modified_base 83: mod_base = OTHER; note = 2'-O-Methyl-cytidine
  modified_base 84: mod_base = OTHER; note = 2'-O-Methyl-adenosine
  modified_base 85: mod_base = OTHER; note = 2'-O-Methyl-cytidine
  modified_base 86: mod_base = OTHER; note = 2'-O-Methyl-cytidine
  modified_base 87: mod_base = OTHER; note = 2'-O-Methyl-guanosine
  modified_base 89: mod_base = OTHER; note = 2'-O-Methyl-guanosine
  modified_base 92: mod_base = OTHER; note = 2'-O-Methyl-guanosine
  modified_base 93: mod_base = OTHER; note = 2'-O-Methyl-guanosine
  modified_base 94: mod_base = OTHER; note = 2'-O-Methyl-uridine
  modified_base 95: mod_base = OTHER; note = 2'-O-Methyl-guanosine
  modified_base 96: mod_base = OTHER; note = 2'-O-Methyl-cytidine
  modified_base 97: mod_base = OTHER; note = 2'-O-Methyl-uridine
  modified_base 98: mod_base = OTHER; note = 2'-O-Methyl-uridine phosphorothioate
  modified_base 99: mod_base = OTHER; note = 2'-O-Methyl-uridine phosphorothioate
  modified_base 100: mod_base = OTHER; note = 2'-O-Methyl-uridine

SEQ ID NO: 2594 - RNA, 103 nt, synthetic construct; identical to SEQ ID NO: 1700
  source 1..103: mol_type = other RNA
  modified_base 1: mod_base = OTHER; note = 2'-O-Methyl-cytidine phosphorothioate
  modified_base 2: mod_base = OTHER; note = 2'-O-Methyl-adenosine phosphorothioate
  modified_base 3: mod_base = OTHER; note = 2'-O-Methyl-guanosine phosphorothioate
  modified_base 21: mod_base = OTHER; note = 2'-O-Methyl-guanosine
  modified_base 28: mod_base = OTHER; note = 2'-O-Methyl-adenosine
  modified_base 29: mod_base = OTHER; note = 2'-O-Methyl-guanosine
  modified_base 30: mod_base = OTHER; note = 2'-O-Methyl-cytidine
  modified_base 31: mod_base = OTHER; note = 2'-O-Methyl-uridine
  modified_base 32: mod_base = OTHER; note = 2'-O-Methyl-adenosine
  modified_base 33: mod_base = OTHER; note = 2'-O-Methyl-guanosine
  modified_base 34: mod_base = OTHER; note = 2'-O-Methyl-adenosine
  modified_base 35: mod_base = OTHER; note = 2'-O-Methyl-adenosine
  modified_base 36: mod_base = OTHER; note = 2'-O-Methyl-adenosine
  modified_base 37: mod_base = OTHER; note = 2'-O-Methyl-uridine
  modified_base 38: mod_base = OTHER; note = 2'-O-Methyl-adenosine
  modified_base 39: mod_base = OTHER; note = 2'-O-Methyl-guanosine
  modified_base 40: mod_base = OTHER; note = 2'-O-Methyl-cytidine
  modified_base 41: mod_base = OTHER; note = 2'-O-Methyl-adenosine
  modified_base 42: mod_base = OTHER; note = 2'-O-Methyl-adenosine
  modified_base 46: mod_base = OTHER; note = 2'-O-Methyl-adenosine
  modified_base 48: mod_base = OTHER; note = 2'-O-Methyl-adenosine
  modified_base 50: mod_base = OTHER; note = 2'-O-Methyl-uridine
  modified_base 52: mod_base = OTHER; note = 2'-O-Methyl-adenosine
  modified_base 53: mod_base = OTHER; note = 2'-O-Methyl-guanosine
  modified_base 54: mod_base = OTHER; note = 2'-O-Methyl-guanosine
  modified_base 57: mod_base = OTHER; note = 2'-O-Methyl-adenosine
  modified_base 61: mod_base = OTHER; note = 2'-O-Methyl-cytidine
  modified_base 66: mod_base = OTHER; note = 2'-O-Methyl-uridine
  modified_base 67: mod_base = OTHER; note = 2'-O-Methyl-cytidine
  modified_base 70: mod_base = OTHER; note = 2'-O-Methyl-cytidine
  modified_base 71: mod_base = OTHER; note = 2'-O-Methyl-uridine
  modified_base 72: mod_base = OTHER; note = 2'-O-Methyl-uridine
  modified_base 73: mod_base = OTHER; note = 2'-O-Methyl-guanosine
  modified_base 74: mod_base = OTHER; note = 2'-O-Methyl-adenosine
  modified_base 75: mod_base = OTHER; note = 2'-O-Methyl-adenosine
  modified_base 76: mod_base = OTHER; note = 2'-O-Methyl-adenosine
  modified_base 77: mod_base = OTHER; note = 2'-O-Methyl-adenosine
  modified_base 78: mod_base = OTHER; note = 2'-O-Methyl-adenosine
  modified_base 79: mod_base = OTHER; note = 2'-O-Methyl-guanosine
  modified_base 80: mod_base = OTHER; note = 2'-O-Methyl-uridine
  modified_base 82: mod_base = OTHER; note = 2'-O-Methyl-guanosine
  modified_base 83: mod_base = OTHER; note = 2'-O-Methyl-cytidine
  modified_base 84: mod_base = OTHER; note = 2'-O-Methyl-adenosine
  modified_base 85: mod_base = OTHER; note = 2'-O-Methyl-cytidine
  modified_base 86: mod_base = OTHER; note = 2'-O-Methyl-cytidine
  modified_base 87: mod_base = OTHER; note = 2'-O-Methyl-guanosine
  modified_base 89: mod_base = OTHER; note = 2'-O-Methyl-guanosine
  modified_base 91: mod_base = OTHER; note = 2'-O-Methyl-cytidine
  modified_base 92: mod_base = OTHER; note = 2'-O-Methyl-guanosine
  modified_base 93: mod_base = OTHER; note = 2'-O-Methyl-guanosine
  modified_base 94: mod_base = OTHER; note = 2'-O-Methyl-uridine
  modified_base 95: mod_base = OTHER; note = 2'-O-Methyl-guanosine
  modified_base 96: mod_base = OTHER; note = 2'-O-Methyl-cytidine
  modified_base 97: mod_base = OTHER; note = 2'-O-Methyl-uridine
  modified_base 98: mod_base = OTHER; note = 2'-O-Methyl-uridine phosphorothioate
  modified_base 99: mod_base = OTHER; note = 2'-O-Methyl-uridine phosphorothioate
  modified_base 100: mod_base = OTHER; note = 2'-O-Methyl-uridine

SEQ ID NO: 2595 - RNA, 103 nt, synthetic construct; identical to SEQ ID NO: 1700
  source 1..103: mol_type = other RNA
  modified_base 1: mod_base = OTHER; note = 2'-O-Methyl-cytidine phosphorothioate
  modified_base 2: mod_base = OTHER; note = 2'-O-Methyl-adenosine phosphorothioate
  modified_base 3: mod_base = OTHER; note = 2'-O-Methyl-guanosine phosphorothioate
  modified_base 21: mod_base = OTHER; note = 2'-O-Methyl-guanosine
  modified_base 28: mod_base = OTHER; note = 2'-O-Methyl-adenosine
  modified_base 29: mod_base = OTHER; note = 2'-O-Methyl-guanosine
  modified_base 30: mod_base = OTHER; note = 2'-O-Methyl-cytidine
  modified_base 31: mod_base = OTHER; note = 2'-O-Methyl-uridine
  modified_base 32: mod_base = OTHER; note = 2'-O-Methyl-adenosine
  modified_base 34: mod_base = OTHER; note = 2'-O-Methyl-adenosine
  modified_base 35: mod_base = OTHER; note = 2'-O-Methyl-adenosine
  modified_base 36: mod_base = OTHER; note = 2'-O-Methyl-adenosine
  modified_base 37: mod_base = OTHER; note = 2'-O-Methyl-uridine
  modified_base 38: mod_base = OTHER; note = 2'-O-Methyl-adenosine
  modified_base 39: mod_base = OTHER; note = 2'-O-Methyl-guanosine
  modified_base 40: mod_base = OTHER; note = 2'-O-Methyl-cytidine
  modified_base 41: mod_base = OTHER; note = 2'-O-Methyl-adenosine
  modified_base 42: mod_base = OTHER; note = 2'-O-Methyl-adenosine
  modified_base 46: mod_base = OTHER; note = 2'-O-Methyl-adenosine
  modified_base 48: mod_base = OTHER; note = 2'-O-Methyl-adenosine
  modified_base 50: mod_base = OTHER; note = 2'-O-Methyl-uridine
  modified_base 52: mod_base = OTHER; note = 2'-O-Methyl-adenosine
  modified_base 53: mod_base = OTHER; note = 2'-O-Methyl-guanosine
  modified_base 54: mod_base = OTHER; note = 2'-O-Methyl-guanosine
  modified_base 57: mod_base = OTHER; note = 2'-O-Methyl-adenosine
  modified_base 61: mod_base = OTHER; note = 2'-O-Methyl-cytidine
  modified_base 66: mod_base = OTHER; note = 2'-O-Methyl-uridine
  modified_base 67: mod_base = OTHER; note = 2'-O-Methyl-cytidine
  modified_base 70: mod_base = OTHER; note = 2'-O-Methyl-cytidine
  modified_base 71: mod_base = OTHER; note = 2'-O-Methyl-uridine
  modified_base 72: mod_base = OTHER; note = 2'-O-Methyl-uridine
  modified_base 73: mod_base = OTHER; note = 2'-O-Methyl-guanosine
  modified_base 74: mod_base = OTHER; note = 2'-O-Methyl-adenosine
  modified_base 75: mod_base = OTHER; note = 2'-O-Methyl-adenosine
  modified_base 76: mod_base = OTHER; note = 2'-O-Methyl-adenosine
  modified_base 77: mod_base = OTHER; note = 2'-O-Methyl-adenosine
  modified_base 78: mod_base = OTHER; note = 2'-O-Methyl-adenosine
  modified_base 79: mod_base = OTHER; note = 2'-O-Methyl-guanosine
  modified_base 80: mod_base = OTHER; note = 2'-O-Methyl-uridine
  modified_base 82: mod_base = OTHER; note = 2'-O-Methyl-guanosine
  modified_base 83: mod_base = OTHER; note = 2'-O-Methyl-cytidine
  modified_base 84: mod_base = OTHER; note = 2'-O-Methyl-adenosine
  modified_base 85: mod_base = OTHER; note = 2'-O-Methyl-cytidine
  modified_base 86: mod_base = OTHER; note = 2'-O-Methyl-cytidine
  modified_base 87: mod_base = OTHER; note = 2'-O-Methyl-guanosine
  modified_base 89: mod_base = OTHER; note = 2'-O-Methyl-guanosine
  modified_base 92: mod_base = OTHER; note = 2'-O-Methyl-guanosine
  modified_base 93: mod_base = OTHER; note = 2'-O-Methyl-guanosine
  modified_base 94: mod_base = OTHER; note = 2'-O-Methyl-uridine
  modified_base 95: mod_base = OTHER; note = 2'-O-Methyl-guanosine
  modified_base 96: mod_base = OTHER; note = 2'-O-Methyl-cytidine
  modified_base 97: mod_base = OTHER; note = 2'-O-Methyl-uridine
  modified_base 98: mod_base = OTHER; note = 2'-O-Methyl-uridine phosphorothioate
  modified_base 99: mod_base = OTHER; note = 2'-O-Methyl-uridine phosphorothioate
  modified_base 100: mod_base = OTHER; note = 2'-O-Methyl-uridine

SEQ ID NO: 2596 - RNA, 103 nt, synthetic construct; identical to SEQ ID NO: 1700
  source 1..103: mol_type = other RNA
  modified_base 1: mod_base = OTHER; note = 2'-O-Methyl-cytidine phosphorothioate
  modified_base 2: mod_base = OTHER; note = 2'-O-Methyl-adenosine phosphorothioate
  modified_base 3: mod_base = OTHER; note = 2'-O-Methyl-guanosine phosphorothioate
  modified_base 21: mod_base = OTHER; note = 2'-O-Methyl-guanosine
  modified_base 28: mod_base = OTHER; note = 2'-O-Methyl-adenosine
  modified_base 29: mod_base = OTHER; note = 2'-O-Methyl-guanosine
  modified_base 30: mod_base = OTHER; note = 2'-O-Methyl-cytidine
  modified_base 31: mod_base = OTHER; note = 2'-O-Methyl-uridine
  modified_base 32: mod_base = OTHER; note = 2'-O-Methyl-adenosine
  modified_base 34: mod_base = OTHER; note = 2'-O-Methyl-adenosine
  modified_base 35: mod_base = OTHER; note = 2'-O-Methyl-adenosine
  modified_base 36: mod_base = OTHER; note = 2'-O-Methyl-adenosine
  modified_base 37: mod_base = OTHER; note = 2'-O-Methyl-uridine
  modified_base 38: mod_base = OTHER; note = 2'-O-Methyl-adenosine
  modified_base 39: mod_base = OTHER; note = 2'-O-Methyl-guanosine
  modified_base 40: mod_base = OTHER; note = 2'-O-Methyl-cytidine
  modified_base 41: mod_base = OTHER; note = 2'-O-Methyl-adenosine
  modified_base 42: mod_base = OTHER; note = 2'-O-Methyl-adenosine
  modified_base 46: mod_base = OTHER; note = 2'-O-Methyl-adenosine
  modified_base 48: mod_base = OTHER; note = 2'-O-Methyl-adenosine
  modified_base 50: mod_base = OTHER; note = 2'-O-Methyl-uridine
  modified_base 52: mod_base = OTHER; note = 2'-O-Methyl-adenosine
  modified_base 53: mod_base = OTHER; note = 2'-O-Methyl-guanosine
  modified_base 54: mod_base = OTHER; note = 2'-O-Methyl-guanosine
  modified_base 57: mod_base = OTHER; note = 2'-O-Methyl-adenosine
  modified_base 61: mod_base = OTHER; note = 2'-O-Methyl-cytidine
  modified_base 66: mod_base = OTHER; note = 2'-O-Methyl-uridine
  modified_base 67: mod_base = OTHER; note = 2'-O-Methyl-cytidine
  modified_base 70: mod_base = OTHER; note = 2'-O-Methyl-cytidine
  modified_base 71: mod_base = OTHER; note = 2'-O-Methyl-uridine
  modified_base 72: mod_base = OTHER; note = 2'-O-Methyl-uridine
  modified_base 73: mod_base = OTHER; note = 2'-O-Methyl-guanosine
  modified_base 74: mod_base = OTHER; note = 2'-O-Methyl-adenosine
  modified_base 75: mod_base = OTHER; note = 2'-O-Methyl-adenosine
  modified_base 76: mod_base = OTHER; note = 2'-O-Methyl-adenosine
  modified_base 77: mod_base = OTHER; note = 2'-O-Methyl-adenosine
  modified_base 78: mod_base = OTHER; note = 2'-O-Methyl-adenosine
  modified_base 79: mod_base = OTHER; note = 2'-O-Methyl-guanosine
  modified_base 80: mod_base = OTHER; note = 2'-O-Methyl-uridine
  modified_base 82: mod_base = OTHER; note = 2'-O-Methyl-guanosine
  modified_base 83: mod_base = OTHER; note = 2'-O-Methyl-cytidine
  modified_base 84: mod_base = OTHER; note = 2'-O-Methyl-adenosine
  modified_base 85: mod_base = OTHER; note = 2'-O-Methyl-cytidine
  modified_base 86: mod_base = OTHER; note = 2'-O-Methyl-cytidine
  modified_base 87: mod_base = OTHER; note = 2'-O-Methyl-guanosine
  modified_base 89: mod_base = OTHER; note = 2'-O-Methyl-guanosine
  modified_base 91: mod_base = OTHER; note = 2'-O-Methyl-cytidine
  modified_base 92: mod_base = OTHER; note = 2'-O-Methyl-guanosine
  modified_base 93: mod_base = OTHER; note = 2'-O-Methyl-guanosine
  modified_base 94: mod_base = OTHER; note = 2'-O-Methyl-uridine
  modified_base 95: mod_base = OTHER; note = 2'-O-Methyl-guanosine
  modified_base 96: mod_base = OTHER; note = 2'-O-Methyl-cytidine
  modified_base 97: mod_base = OTHER; note = 2'-O-Methyl-uridine
  modified_base 98: mod_base = OTHER; note = 2'-O-Methyl-uridine phosphorothioate
  modified_base 99: mod_base = OTHER; note = 2'-O-Methyl-uridine phosphorothioate
  modified_base 100: mod_base = OTHER; note = 2'-O-Methyl-uridine

SEQ ID NO: 2597 - RNA, 103 nt, synthetic construct; identical to SEQ ID NO: 1700
  source 1..103: mol_type = other RNA
  modified_base 1: mod_base = OTHER; note = 2'-O-Methyl-cytidine phosphorothioate
  modified_base 2: mod_base = OTHER; note = 2'-O-Methyl-adenosine phosphorothioate
  modified_base 3: mod_base = OTHER; note = 2'-O-Methyl-guanosine phosphorothioate
  modified_base 21: mod_base = OTHER; note = 2'-O-Methyl-guanosine
  modified_base 28: mod_base = OTHER; note = 2'-O-Methyl-adenosine
  modified_base 29: mod_base = OTHER; note = 2'-O-Methyl-guanosine
  modified_base 30: mod_base = OTHER; note = 2'-O-Methyl-cytidine
  modified_base 31: mod_base = OTHER; note = 2'-O-Methyl-uridine
  modified_base 32: mod_base = OTHER; note = 2'-O-Methyl-adenosine
  modified_base 34: mod_base = OTHER; note = 2'-O-Methyl-adenosine
  modified_base 35: mod_base = OTHER; note = 2'-O-Methyl-adenosine
  modified_base 36: mod_base = OTHER; note = 2'-O-Methyl-adenosine
  modified_base 37: mod_base = OTHER; note = 2'-O-Methyl-uridine
  modified_base 38: mod_base = OTHER; note = 2'-O-Methyl-adenosine
  modified_base 39: mod_base = OTHER; note = 2'-O-Methyl-guanosine
  modified_base 40: mod_base = OTHER; note = 2'-O-Methyl-cytidine
  modified_base 41: mod_base = OTHER; note = 2'-O-Methyl-adenosine
  modified_base 42: mod_base = OTHER; note = 2'-O-Methyl-adenosine
  modified_base 46: mod_base = OTHER; note = 2'-O-Methyl-adenosine
  modified_base 48: mod_base = OTHER; note = 2'-O-Methyl-adenosine
  modified_base 50: mod_base = OTHER; note = 2'-O-Methyl-uridine
  modified_base 52: mod_base = OTHER; note = 2'-O-Methyl-adenosine
  modified_base 53: mod_base = OTHER; note = 2'-O-Methyl-guanosine
  modified_base 54: mod_base = OTHER; note = 2'-O-Methyl-guanosine
  modified_base 55: mod_base = OTHER; note = 2'-O-Methyl-cytidine
  modified_base 56: mod_base = OTHER; note = 2'-O-Methyl-uridine
  modified_base 57: mod_base = OTHER; note = 2'-O-Methyl-adenosine
  modified_base 60: mod_base = OTHER; note = 2'-O-Methyl-cytidine
  modified_base 61: mod_base = OTHER; note = 2'-O-Methyl-cytidine
  modified_base 66: mod_base = OTHER; note = 2'-O-Methyl-uridine
  modified_base 67: mod_base = OTHER; note = 2'-O-Methyl-cytidine
  modified_base 70: mod_base = OTHER; note = 2'-O-Methyl-cytidine
  modified_base 71: mod_base = OTHER; note = 2'-O-Methyl-uridine
  modified_base 72: mod_base = OTHER; note = 2'-O-Methyl-uridine
  modified_base 74: mod_base = OTHER; note = 2'-O-Methyl-adenosine
  modified_base 75: mod_base = OTHER; note = 2'-O-Methyl-adenosine
  modified_base 76: mod_base = OTHER; note = 2'-O-Methyl-adenosine
  modified_base 77: mod_base = OTHER; note = 2'-O-Methyl-adenosine
  modified_base 78: mod_base = OTHER; note = 2'-O-Methyl-adenosine
  modified_base 79: mod_base = OTHER; note = 2'-O-Methyl-guanosine
  modified_base 80: mod_base = OTHER; note = 2'-O-Methyl-uridine
  modified_base 82: mod_base = OTHER; note = 2'-O-Methyl-guanosine
  modified_base 83: mod_base = OTHER; note = 2'-O-Methyl-cytidine
  modified_base 84: mod_base = OTHER; note = 2'-O-Methyl-adenosine
  modified_base 85: mod_base = OTHER; note = 2'-O-Methyl-cytidine
  modified_base 86: mod_base = OTHER; note = 2'-O-Methyl-cytidine
  modified_base 87: mod_base = OTHER; note = 2'-O-Methyl-guanosine
  modified_base 89: mod_base = OTHER; note = 2'-O-Methyl-guanosine
  modified_base 92: mod_base = OTHER; note = 2'-O-Methyl-guanosine
  modified_base 93: mod_base = OTHER; note = 2'-O-Methyl-guanosine
  modified_base 94: mod_base = OTHER; note = 2'-O-Methyl-uridine
  modified_base 95: mod_base = OTHER; note = 2'-O-Methyl-guanosine
  modified_base 96: mod_base = OTHER; note = 2'-O-Methyl-cytidine
  modified_base 97: mod_base = OTHER; note = 2'-O-Methyl-uridine
  modified_base 98: mod_base = OTHER; note = 2'-O-Methyl-uridine phosphorothioate
  modified_base 99: mod_base = OTHER; note = 2'-O-Methyl-uridine phosphorothioate
  modified_base 100: mod_base = OTHER; note = 2'-O-Methyl-uridine

SEQ ID NO: 2598 - RNA, 103 nt, synthetic construct; identical to SEQ ID NO: 1643
  source 1..103: mol_type = other RNA
  modified_base 1: mod_base = OTHER; note = 2'-O-Methyl-cytidine phosphorothioate
  modified_base 2: mod_base = OTHER; note = 2'-O-Methyl-cytidine phosphorothioate
  modified_base 3: mod_base = OTHER; note = 2'-O-Methyl-cytidine phosphorothioate
  modified_base 21: mod_base = OTHER; note = 2'-O-Methyl-guanosine
  modified_base 28: mod_base = OTHER; note = 2'-O-Methyl-adenosine
  modified_base 29: mod_base = OTHER; note = 2'-O-Methyl-guanosine
  modified_base 30: mod_base = OTHER; note = 2'-O-Methyl-cytidine
  modified_base 31: mod_base = OTHER; note = 2'-O-Methyl-uridine
  modified_base 32: mod_base = OTHER; note = 2'-O-Methyl-adenosine
  modified_base 34: mod_base = OTHER; note = 2'-O-Methyl-adenosine
  modified_base 35: mod_base = OTHER; note = 2'-O-Methyl-adenosine
  modified_base 36: mod_base = OTHER; note = 2'-O-Methyl-adenosine
  modified_base 37: mod_base = OTHER; note = 2'-O-Methyl-uridine
  modified_base 38: mod_base = OTHER; note = 2'-O-Methyl-adenosine
  modified_base 39: mod_base = OTHER; note = 2'-O-Methyl-guanosine
  modified_base 40: mod_base = OTHER; note = 2'-O-Methyl-cytidine
  modified_base 41: mod_base = OTHER; note = 2'-O-Methyl-adenosine
  modified_base 42: mod_base = OTHER; note = 2'-O-Methyl-adenosine
  modified_base 46: mod_base = OTHER; note = 2'-O-Methyl-adenosine
  modified_base 48: mod_base = OTHER; note = 2'-O-Methyl-adenosine
  modified_base 50: mod_base = OTHER; note = 2'-O-Methyl-uridine
  modified_base 52: mod_base = OTHER; note = 2'-O-Methyl-adenosine
  modified_base 53: mod_base = OTHER; note = 2'-O-Methyl-guanosine
  modified_base 54: mod_base = OTHER; note = 2'-O-Methyl-guanosine
  modified_base 57: mod_base = OTHER; note = 2'-O-Methyl-adenosine
  modified_base 61: mod_base = OTHER; note = 2'-O-Methyl-cytidine
  modified_base 64: mod_base = OTHER; note = uridine phosphorothioate
  modified_base 66: mod_base = OTHER; note = 2'-O-Methyl-uridine
  modified_base 67: mod_base = OTHER; note = 2'-O-Methyl-cytidine
  modified_base 70: mod_base = OTHER; note = 2'-O-Methyl-cytidine
  modified_base 71: mod_base = OTHER; note = 2'-O-Methyl-uridine
  modified_base 72: mod_base = OTHER; note = 2'-O-Methyl-uridine
  modified_base 74: mod_base = OTHER; note = 2'-O-Methyl-adenosine
  modified_base 75: mod_base = OTHER; note = 2'-O-Methyl-adenosine
  modified_base 76: mod_base = OTHER; note = 2'-O-Methyl-adenosine
  modified_base 77: mod_base = OTHER; note = 2'-O-Methyl-adenosine
  modified_base 78: mod_base = OTHER; note = 2'-O-Methyl-adenosine
  modified_base 79: mod_base = OTHER; note = 2'-O-Methyl-guanosine
  modified_base 80: mod_base = OTHER; note = 2'-O-Methyl-uridine
  modified_base 82: mod_base = OTHER; note = 2'-O-Methyl-guanosine
  modified_base 83: mod_base = OTHER; note = 2'-O-Methyl-cytidine
  modified_base 84: mod_base = OTHER; note = 2'-O-Methyl-adenosine
  modified_base 85: mod_base = OTHER; note = 2'-O-Methyl-cytidine
  modified_base 86: mod_base = OTHER; note = 2'-O-Methyl-cytidine
  modified_base 87: mod_base = OTHER; note = 2'-O-Methyl-guanosine
  modified_base 89: mod_base = OTHER; note = 2'-O-Methyl-guanosine
  modified_base 92: mod_base = OTHER; note = 2'-O-Methyl-guanosine
  modified_base 93: mod_base = OTHER; note = 2'-O-Methyl-guanosine
  modified_base 94: mod_base = OTHER; note = 2'-O-Methyl-uridine
  modified_base 95: mod_base = OTHER; note = 2'-O-Methyl-guanosine
  modified_base 96: mod_base = OTHER; note = 2'-O-Methyl-cytidine
  modified_base 97: mod_base = OTHER; note = 2'-O-Methyl-uridine
  modified_base 98: mod_base = OTHER; note = 2'-O-Methyl-uridine phosphorothioate
  modified_base 99: mod_base = OTHER; note = 2'-O-Methyl-uridine phosphorothioate
  modified_base 100: mod_base = OTHER; note = 2'-O-Methyl-uridine

SEQ ID NO: 2599 - RNA, 103 nt, synthetic construct; identical to SEQ ID NO: 1643
  source 1..103: mol_type = other RNA
  modified_base 1: mod_base = OTHER; note = 2'-O-Methyl-cytidine phosphorothioate
  modified_base 2: mod_base = OTHER; note = 2'-O-Methyl-cytidine phosphorothioate
  modified_base 3: mod_base = OTHER; note = 2'-O-Methyl-cytidine phosphorothioate
  modified_base 21: mod_base = OTHER; note = 2'-O-Methyl-guanosine
  modified_base 28: mod_base = OTHER; note = 2'-O-Methyl-adenosine
  modified_base 29: mod_base = OTHER; note = 2'-O-Methyl-guanosine
  modified_base 30: mod_base = OTHER; note = 2'-O-Methyl-cytidine
  modified_base 31: mod_base = OTHER; note = 2'-O-Methyl-uridine
  modified_base 32: mod_base = OTHER; note = 2'-O-Methyl-adenosine
  modified_base 33: mod_base = OTHER; note = 2'-O-Methyl-guanosine
  modified_base 34: mod_base = OTHER; note = 2'-O-Methyl-adenosine
  modified_base 35: mod_base = OTHER; note = 2'-O-Methyl-adenosine
  modified_base 36: mod_base = OTHER; note = 2'-O-Methyl-adenosine
  modified_base 37: mod_base = OTHER; note = 2'-O-Methyl-uridine
  modified_base 38: mod_base = OTHER; note = 2'-O-Methyl-adenosine
  modified_base 39: mod_base = OTHER; note = 2'-O-Methyl-guanosine
  modified_base 40: mod_base = OTHER; note = 2'-O-Methyl-cytidine
  modified_base 41: mod_base = OTHER; note = 2'-O-Methyl-adenosine
  modified_base 42: mod_base = OTHER; note = 2'-O-Methyl-adenosine
  modified_base 46: mod_base = OTHER; note = 2'-O-Methyl-adenosine
  modified_base 48: mod_base = OTHER; note = 2'-O-Methyl-adenosine
  modified_base 50: mod_base = OTHER; note = 2'-O-Methyl-uridine
  modified_base 52: mod_base = OTHER; note = 2'-O-Methyl-adenosine
  modified_base 53: mod_base = OTHER; note = 2'-O-Methyl-guanosine
  modified_base 54: mod_base = OTHER; note = 2'-O-Methyl-guanosine
  modified_base 55: mod_base = OTHER; note = 2'-O-Methyl-cytidine
  modified_base 56: mod_base = OTHER; note = 2'-O-Methyl-uridine
  modified_base 57: mod_base = OTHER; note = 2'-O-Methyl-adenosine
  modified_base 60: mod_base = OTHER; note = 2'-O-Methyl-cytidine
  modified_base 61: mod_base = OTHER; note = 2'-O-Methyl-cytidine
  modified_base 64: mod_base = OTHER; note = uridine phosphorothioate
  modified_base 66: mod_base = OTHER; note = 2'-O-Methyl-uridine
  modified_base 67: mod_base = OTHER; note = 2'-O-Methyl-cytidine
  modified_base 70: mod_base = OTHER; note = 2'-O-Methyl-cytidine
  modified_base 71: mod_base = OTHER; note = 2'-O-Methyl-uridine
  modified_base 72: mod_base = OTHER; note = 2'-O-Methyl-uridine
  modified_base 73: mod_base = OTHER; note = 2'-O-Methyl-guanosine
  modified_base 74: mod_base = OTHER; note = 2'-O-Methyl-adenosine
  modified_base 75: mod_base = OTHER; note = 2'-O-Methyl-adenosine
  modified_base 76: mod_base = OTHER; note = 2'-O-Methyl-adenosine
  modified_base 77: mod_base = OTHER; note = 2'-O-Methyl-adenosine
  modified_base 78: mod_base = OTHER; note = 2'-O-Methyl-adenosine
  modified_base 79: mod_base = OTHER; note = 2'-O-Methyl-guanosine
  modified_base 80: mod_base = OTHER; note = 2'-O-Methyl-uridine
  modified_base 81: mod_base = OTHER; note = 2'-O-Methyl-guanosine
  modified_base 83: mod_base = OTHER; note = 2'-O-Methyl-cytidine
  modified_base 84: mod_base = OTHER; note = 2'-O-Methyl-adenosine
  modified_base 85: mod_base = OTHER; note = 2'-O-Methyl-cytidine
  modified_base 86: mod_base = OTHER; note = 2'-O-Methyl-cytidine
  modified_base 87: mod_base = OTHER; note = 2'-O-Methyl-guanosine
  modified_base 88: mod_base = OTHER; note = 2'-O-Methyl-adenosine
  modified_base 89: mod_base = OTHER; note = 2'-O-Methyl-guanosine
  modified_base 90: mod_base = OTHER; note = 2'-O-Methyl-uridine
  modified_base 91: mod_base = OTHER; note = 2'-O-Methyl-cytidine
  modified_base 92: mod_base = OTHER; note = 2'-O-Methyl-guanosine
  modified_base 93: mod_base = OTHER; note = 2'-O-Methyl-guanosine
  modified_base 94: mod_base = OTHER; note = 2'-O-Methyl-uridine
  modified_base 95: mod_base = OTHER; note = 2'-O-Methyl-guanosine
  modified_base 96: mod_base = OTHER; note = 2'-O-Methyl-cytidine
  modified_base 97: mod_base = OTHER; note = 2'-O-Methyl-uridine
  modified_base 98: mod_base = OTHER; note = 2'-O-Methyl-uridine phosphorothioate
  modified_base 99: mod_base = OTHER; note = 2'-O-Methyl-uridine phosphorothioate
  modified_base 100: mod_base = OTHER; note = 2'-O-Methyl-uridine

SEQ ID NO: 2600 - RNA, 103 nt, synthetic construct; identical to SEQ ID NO: 1643
  source 1..103: mol_type = other RNA
  modified_base 1: mod_base = OTHER; note = 2'-O-Methyl-cytidine phosphorothioate
  modified_base 2: mod_base = OTHER; note = 2'-O-Methyl-cytidine phosphorothioate
  modified_base 3: mod_base = OTHER; note = 2'-O-Methyl-cytidine phosphorothioate
  modified_base 21: mod_base = OTHER; note = 2'-O-Methyl-guanosine
  modified_base 28: mod_base = OTHER; note = 2'-O-Methyl-adenosine
  modified_base 29: mod_base = OTHER; note = 2'-O-Methyl-guanosine
  modified_base 30: mod_base = OTHER; note = 2'-O-Methyl-cytidine
  modified_base 31: mod_base = OTHER; note = 2'-O-Methyl-uridine
  modified_base 32: mod_base = OTHER; note = 2'-O-Methyl-adenosine
  modified_base 34: mod_base = OTHER; note = 2'-O-Methyl-adenosine
  modified_base 35: mod_base = OTHER; note = 2'-O-Methyl-adenosine
  modified_base 36: mod_base = OTHER; note = 2'-O-Methyl-adenosine
  modified_base 37: mod_base = OTHER; note = 2'-O-Methyl-uridine
  modified_base 38: mod_base = OTHER; note = 2'-O-Methyl-adenosine
  modified_base 39: mod_base = OTHER; note = 2'-O-Methyl-guanosine
  modified_base 40: mod_base = OTHER; note = 2'-O-Methyl-cytidine
  modified_base 41: mod_base = OTHER; note = 2'-O-Methyl-adenosine
  modified_base 42: mod_base = OTHER; note = 2'-O-Methyl-adenosine
  modified_base 46: mod_base = OTHER; note = 2'-O-Methyl-adenosine
  modified_base 48: mod_base = OTHER; note = 2'-O-Methyl-adenosine
  modified_base 50: mod_base = OTHER; note = 2'-O-Methyl-uridine
  modified_base 52: mod_base = OTHER; note = 2'-O-Methyl-adenosine
  modified_base 53: mod_base = OTHER; note = 2'-O-Methyl-guanosine
  modified_base 54: mod_base = OTHER; note = 2'-O-Methyl-guanosine
  modified_base 55: mod_base = OTHER; note = 2'-O-Methyl-cytidine
  modified_base 56: mod_base = OTHER; note = 2'-O-Methyl-uridine
  modified_base 57: mod_base = OTHER; note = 2'-O-Methyl-adenosine
  modified_base 60: mod_base = OTHER; note = 2'-O-Methyl-cytidine
  modified_base 61: mod_base = OTHER; note = 2'-O-Methyl-cytidine
  modified_base 64: mod_base = OTHER; note = uridine phosphorothioate
  modified_base 66: mod_base = OTHER; note = 2'-O-Methyl-uridine
  modified_base 67: mod_base = OTHER; note = 2'-O-Methyl-cytidine
  modified_base 70: mod_base = OTHER; note = 2'-O-Methyl-cytidine
  modified_base 71: mod_base = OTHER; note = 2'-O-Methyl-uridine
  modified_base 72: mod_base = OTHER; note = 2'-O-Methyl-uridine
  modified_base 74: mod_base = OTHER; note = 2'-O-Methyl-adenosine
  modified_base 75: mod_base = OTHER; note = 2'-O-Methyl-adenosine
  modified_base 76: mod_base = OTHER; note = 2'-O-Methyl-adenosine
  modified_base 77: mod_base = OTHER; note = 2'-O-Methyl-adenosine
  modified_base 78: mod_base = OTHER; note = 2'-O-Methyl-adenosine
  modified_base 79: mod_base = OTHER; note = 2'-O-Methyl-guanosine
  modified_base 80: mod_base = OTHER; note = 2'-O-Methyl-uridine
  modified_base 81: mod_base = OTHER; note = 2'-O-Methyl-guanosine
  modified_base 83: mod_base = OTHER; note = 2'-O-Methyl-cytidine
  modified_base 84: mod_base = OTHER; note = 2'-O-Methyl-adenosine
  modified_base 85: mod_base = OTHER; note = 2'-O-Methyl-cytidine
  modified_base 86: mod_base = OTHER; note = 2'-O-Methyl-cytidine
  modified_base 87: mod_base = OTHER; note = 2'-O-Methyl-guanosine
  modified_base 88: mod_base = OTHER; note = 2'-O-Methyl-adenosine
  modified_base 89: mod_base = OTHER; note = 2'-O-Methyl-guanosine
  modified_base 90: mod_base = OTHER; note = 2'-O-Methyl-uridine
  modified_base 91: mod_base = OTHER; note = 2'-O-Methyl-cytidine
  modified_base 92: mod_base = OTHER; note = 2'-O-Methyl-guanosine
  modified_base 93: mod_base = OTHER; note = 2'-O-Methyl-guanosine
  modified_base 94: mod_base = OTHER; note = 2'-O-Methyl-uridine
  modified_base 95: mod_base = OTHER; note = 2'-O-Methyl-guanosine
  modified_base 96: mod_base = OTHER; note = 2'-O-Methyl-cytidine
  modified_base 97: mod_base = OTHER; note = 2'-O-Methyl-uridine
  modified_base 98: mod_base = OTHER; note = 2'-O-Methyl-uridine phosphorothioate
  modified_base 99: mod_base = OTHER; note = 2'-O-Methyl-uridine phosphorothioate
  modified_base 100: mod_base = OTHER; note = 2'-O-Methyl-uridine

SEQ ID NO: 2601 - RNA, 103 nt, synthetic construct; identical to SEQ ID NO: 1699
  source 1..103: mol_type = other RNA
  modified_base 1: mod_base = OTHER; note = 2'-O-Methyl-guanosine phosphorothioate
  modified_base 2: mod_base = OTHER; note = 2'-O-Methyl-adenosine phosphorothioate
  modified_base 3: mod_base = OTHER; note = 2'-O-Methyl-guanosine phosphorothioate
  modified_base 21: mod_base = OTHER; note = 2'-O-Methyl-guanosine
  modified_base 28: mod_base = OTHER; note = 2'-O-Methyl-adenosine
  modified_base 29: mod_base = OTHER; note = 2'-O-Methyl-guanosine
  modified_base 30: mod_base = OTHER; note = 2'-O-Methyl-cytidine
  modified_base 31: mod_base = OTHER; note = 2'-O-Methyl-uridine
  modified_base 32: mod_base = OTHER; note = 2'-O-Methyl-adenosine
  modified_base 33: mod_base = OTHER; note = 2'-O-Methyl-guanosine
  modified_base 34: mod_base = OTHER; note = 2'-O-Methyl-adenosine
  modified_base 35: mod_base = OTHER; note = 2'-O-Methyl-adenosine
  modified_base 36: mod_base = OTHER; note = 2'-O-Methyl-adenosine
  modified_base 37: mod_base = OTHER; note = 2'-O-Methyl-uridine
  modified_base 38: mod_base = OTHER; note = 2'-O-Methyl-adenosine
  modified_base 39: mod_base = OTHER; note = 2'-O-Methyl-guanosine
  modified_base 40: mod_base = OTHER; note = 2'-O-Methyl-cytidine
  modified_base 41: mod_base = OTHER; note = 2'-O-Methyl-adenosine
  modified_base 42: mod_base = OTHER; note = 2'-O-Methyl-adenosine
  modified_base 46: mod_base = OTHER; note = 2'-O-Methyl-adenosine
  modified_base 48: mod_base = OTHER; note = 2'-O-Methyl-adenosine
  modified_base 50: mod_base = OTHER; note = 2'-O-Methyl-uridine
  modified_base 52: mod_base = OTHER; note = 2'-O-Methyl-adenosine
  modified_base 53: mod_base = OTHER; note = 2'-O-Methyl-guanosine
  modified_base 54: mod_base = OTHER; note = 2'-O-Methyl-guanosine
  modified_base 55: mod_base = OTHER; note = 2'-O-Methyl-cytidine
  modified_base 56: mod_base = OTHER; note = 2'-O-Methyl-uridine
  modified_base 57: mod_base = OTHER; note = 2'-O-Methyl-adenosine
  modified_base 60: mod_base = OTHER; note = 2'-O-Methyl-cytidine
  modified_base 61: mod_base = OTHER; note = 2'-O-Methyl-cytidine
  modified_base 64: mod_base = OTHER; note = uridine phosphorothioate
  modified_base 66: mod_base = OTHER; note = 2'-O-Methyl-uridine
  modified_base 67: mod_base = OTHER; note = 2'-O-Methyl-cytidine
  modified_base 70: mod_base = OTHER; note = 2'-O-Methyl-cytidine
  modified_base 71: mod_base = OTHER; note = 2'-O-Methyl-uridine
  modified_base 72: mod_base = OTHER; note = 2'-O-Methyl-uridine
  modified_base 73: mod_base = OTHER; note = 2'-O-Methyl-guanosine
  modified_base 74: mod_base = OTHER; note = 2'-O-Methyl-adenosine
  modified_base 75: mod_base = OTHER; note = 2'-O-Methyl-adenosine
  modified_base 76: mod_base = OTHER; note = 2'-O-Methyl-adenosine
  modified_base 77: mod_base = OTHER; note = 2'-O-Methyl-adenosine
  modified_base 78: mod_base = OTHER; note = 2'-O-Methyl-adenosine
  modified_base 79: mod_base = OTHER; note = 2'-O-Methyl-guanosine
  modified_base 80: mod_base = OTHER; note = 2'-O-Methyl-uridine
  modified_base 81: mod_base = OTHER; note = 2'-O-Methyl-guanosine
  modified_base 83: mod_base = OTHER; note = 2'-O-Methyl-cytidine
  modified_base 84: mod_base = OTHER; note = 2'-O-Methyl-adenosine
  modified_base 85: mod_base = OTHER; note = 2'-O-Methyl-cytidine
  modified_base 86: mod_base = OTHER; note = 2'-O-Methyl-cytidine
  modified_base 87: mod_base = OTHER; note = 2'-O-Methyl-guanosine
  modified_base 88: mod_base = OTHER; note = 2'-O-Methyl-adenosine
  modified_base 89: mod_base = OTHER; note = 2'-O-Methyl-guanosine
  modified_base 90: mod_base = OTHER; note = 2'-O-Methyl-uridine
  modified_base 91: mod_base = OTHER; note = 2'-O-Methyl-cytidine
  modified_base 92: mod_base = OTHER; note = 2'-O-Methyl-guanosine
  modified_base 93: mod_base = OTHER; note = 2'-O-Methyl-guanosine
  modified_base 94: mod_base = OTHER; note = 2'-O-Methyl-uridine
  modified_base 95: mod_base = OTHER; note = 2'-O-Methyl-guanosine
  modified_base 96: mod_base = OTHER; note = 2'-O-Methyl-cytidine
  modified_base 97: mod_base = OTHER; note = 2'-O-Methyl-uridine
  modified_base 98: mod_base = OTHER; note = 2'-O-Methyl-uridine phosphorothioate
  modified_base 99: mod_base = OTHER; note = 2'-O-Methyl-uridine phosphorothioate
  modified_base 100: mod_base = OTHER; note = 2'-O-Methyl-uridine

SEQ ID NO: 2602 - RNA, 103 nt, synthetic construct; identical to SEQ ID NO: 1699
  source 1..103: mol_type = other RNA
  modified_base 1: mod_base = OTHER; note = 2'-O-Methyl-guanosine phosphorothioate
  modified_base 2: mod_base = OTHER; note = 2'-O-Methyl-adenosine phosphorothioate
  modified_base 3: mod_base = OTHER; note = 2'-O-Methyl-guanosine phosphorothioate
  modified_base 21: mod_base = OTHER; note = 2'-O-Methyl-guanosine
  modified_base 28: mod_base = OTHER; note = 2'-O-Methyl-adenosine
  modified_base 29: mod_base = OTHER; note = 2'-O-Methyl-guanosine
  modified_base 30: mod_base = OTHER; note = 2'-O-Methyl-cytidine
  modified_base 31: mod_base = OTHER; note = 2'-O-Methyl-uridine
  modified_base 32: mod_base = OTHER; note = 2'-O-Methyl-adenosine
  modified_base 34: mod_base = OTHER; note = 2'-O-Methyl-adenosine
  modified_base 35: mod_base = OTHER; note = 2'-O-Methyl-adenosine
  modified_base 36: mod_base = OTHER; note = 2'-O-Methyl-adenosine
  modified_base 37: mod_base = OTHER; note = 2'-O-Methyl-uridine
  modified_base 38: mod_base = OTHER; note = 2'-O-Methyl-adenosine
  modified_base 39: mod_base = OTHER; note = 2'-O-Methyl-guanosine
  modified_base 40: mod_base = OTHER; note = 2'-O-Methyl-cytidine
  modified_base 41: mod_base = OTHER; note = 2'-O-Methyl-adenosine
  modified_base 42: mod_base = OTHER; note = 2'-O-Methyl-adenosine
  modified_base 46: mod_base = OTHER; note = 2'-O-Methyl-adenosine
  modified_base 48: mod_base = OTHER; note = 2'-O-Methyl-adenosine
  modified_base 50: mod_base = OTHER; note = 2'-O-Methyl-uridine
  modified_base 52: mod_base = OTHER; note = 2'-O-Methyl-adenosine
  modified_base 53: mod_base = OTHER; note = 2'-O-Methyl-guanosine
  modified_base 54: mod_base = OTHER; note = 2'-O-Methyl-guanosine
  modified_base 55: mod_base = OTHER; note = 2'-O-Methyl-cytidine
  modified_base 56: mod_base = OTHER; note = 2'-O-Methyl-uridine
  modified_base 57: mod_base = OTHER; note = 2'-O-Methyl-adenosine
  modified_base 60: mod_base = OTHER; note = 2'-O-Methyl-cytidine
  modified_base 61: mod_base = OTHER; note = 2'-O-Methyl-cytidine
  modified_base 64: mod_base = OTHER; note = uridine phosphorothioate
  modified_base 66: mod_base = OTHER; note = 2'-O-Methyl-uridine
  modified_base 67: mod_base = OTHER; note = 2'-O-Methyl-cytidine
  modified_base 70: mod_base = OTHER; note = 2'-O-Methyl-cytidine
  modified_base 71: mod_base = OTHER; note = 2'-O-Methyl-uridine
  modified_base 72: mod_base = OTHER; note = 2'-O-Methyl-uridine
  modified_base 74: mod_base = OTHER; note = 2'-O-Methyl-adenosine
  modified_base 75: mod_base = OTHER; note = 2'-O-Methyl-adenosine
  modified_base 76: mod_base = OTHER; note = 2'-O-Methyl-adenosine
  modified_base 77: mod_base = OTHER; note = 2'-O-Methyl-adenosine
  modified_base 78: mod_base = OTHER; note = 2'-O-Methyl-adenosine
  modified_base 79: mod_base = OTHER; note = 2'-O-Methyl-guanosine
  modified_base 80: mod_base = OTHER; note = 2'-O-Methyl-uridine
  modified_base 81: mod_base = OTHER; note = 2'-O-Methyl-guanosine
  modified_base 83: mod_base = OTHER; note = 2'-O-Methyl-cytidine
  modified_base 84: mod_base = OTHER; note = 2'-O-Methyl-adenosine
  modified_base 85: mod_base = OTHER; note = 2'-O-Methyl-cytidine
  modified_base 86: mod_base = OTHER; note = 2'-O-Methyl-cytidine
  modified_base 87: mod_base = OTHER; note = 2'-O-Methyl-guanosine
  modified_base 88: mod_base = OTHER; note = 2'-O-Methyl-adenosine
  modified_base 89: mod_base = OTHER; note = 2'-O-Methyl-guanosine
  modified_base 90: mod_base = OTHER; note = 2'-O-Methyl-uridine
  modified_base 91: mod_base = OTHER; note = 2'-O-Methyl-cytidine
  modified_base 92: mod_base = OTHER; note = 2'-O-Methyl-guanosine
  modified_base 93: mod_base = OTHER; note = 2'-O-Methyl-guanosine
  modified_base 94: mod_base = OTHER; note = 2'-O-Methyl-uridine
  modified_base 95: mod_base = OTHER; note = 2'-O-Methyl-guanosine
  modified_base 96: mod_base = OTHER; note = 2'-O-Methyl-cytidine
  modified_base 97: mod_base = OTHER; note = 2'-O-Methyl-uridine
  modified_base 98: mod_base = OTHER; note = 2'-O-Methyl-uridine phosphorothioate
  modified_base 99: mod_base = OTHER; note = 2'-O-Methyl-uridine phosphorothioate
  modified_base 100: mod_base = OTHER; note = 2'-O-Methyl-uridine

SEQ ID NO: 2603 - RNA, 103 nt, synthetic construct; identical to SEQ ID NO: 1700
  source 1..103: mol_type = other RNA
  modified_base 1: mod_base = OTHER; note = 2'-O-Methyl-cytidine phosphorothioate
  modified_base 2: mod_base = OTHER; note = 2'-O-Methyl-adenosine phosphorothioate
  modified_base 3: mod_base = OTHER; note = 2'-O-Methyl-guanosine phosphorothioate
  modified_base 21: mod_base = OTHER; note = 2'-O-Methyl-guanosine
  modified_base 28: mod_base = OTHER; note = 2'-O-Methyl-adenosine
  modified_base 29: mod_base = OTHER; note = 2'-O-Methyl-guanosine
  modified_base 30: mod_base = OTHER; note = 2'-O-Methyl-cytidine
  modified_base 31: mod_base = OTHER; note = 2'-O-Methyl-uridine
  modified_base 32: mod_base = OTHER; note = 2'-O-Methyl-adenosine
  modified_base 33: mod_base = OTHER; note = 2'-O-Methyl-guanosine
  modified_base 34: mod_base = OTHER; note = 2'-O-Methyl-adenosine
  modified_base 35: mod_base = OTHER; note = 2'-O-Methyl-adenosine
  modified_base 36: mod_base = OTHER; note = 2'-O-Methyl-adenosine
  modified_base 37: mod_base = OTHER; note = 2'-O-Methyl-uridine
  modified_base 38: mod_base = OTHER; note = 2'-O-Methyl-adenosine
  modified_base 39: mod_base = OTHER; note = 2'-O-Methyl-guanosine
  modified_base 40: mod_base = OTHER; note = 2'-O-Methyl-cytidine
  modified_base 41: mod_base = OTHER; note = 2'-O-Methyl-adenosine
  modified_base 42: mod_base = OTHER; note = 2'-O-Methyl-adenosine
  modified_base 46: mod_base = OTHER; note = 2'-O-Methyl-adenosine
  modified_base 48: mod_base = OTHER; note = 2'-O-Methyl-adenosine
  modified_base 50: mod_base = OTHER; note = 2'-O-Methyl-uridine
  modified_base 52: mod_base = OTHER; note = 2'-O-Methyl-adenosine
  modified_base 53: mod_base = OTHER; note = 2'-O-Methyl-guanosine
  modified_base 54: mod_base = OTHER; note = 2'-O-Methyl-guanosine
  modified_base 57: mod_base = OTHER; note = 2'-O-Methyl-adenosine
  modified_base 61: mod_base = OTHER; note = 2'-O-Methyl-cytidine
  modified_base 64: mod_base = OTHER; note = uridine phosphorothioate
  modified_base 66: mod_base = OTHER; note = 2'-O-Methyl-uridine
  modified_base 67: mod_base = OTHER; note = 2'-O-Methyl-cytidine
  modified_base 70: mod_base = OTHER; note = 2'-O-Methyl-cytidine
  modified_base 71: mod_base = OTHER; note = 2'-O-Methyl-uridine
  modified_base 72: mod_base = OTHER; note = 2'-O-Methyl-uridine
  modified_base 74: mod_base = OTHER; note = 2'-O-Methyl-adenosine
  modified_base 75: mod_base = OTHER; note = 2'-O-Methyl-adenosine
  modified_base 76: mod_base = OTHER; note = 2'-O-Methyl-adenosine
  modified_base 77: mod_base = OTHER; note = 2'-O-Methyl-adenosine
  modified_base 78: mod_base = OTHER; note = 2'-O-Methyl-adenosine
  modified_base 79: mod_base = OTHER; note = 2'-O-Methyl-guanosine
  modified_base 80: mod_base = OTHER; note = 2'-O-Methyl-uridine
  modified_base 82: mod_base = OTHER; note = 2'-O-Methyl-guanosine
  modified_base 83: mod_base = OTHER; note = 2'-O-Methyl-cytidine
  modified_base 84: mod_base = OTHER; note = 2'-O-Methyl-adenosine
  modified_base 85: mod_base = OTHER; note = 2'-O-Methyl-cytidine
  modified_base 86: mod_base = OTHER; note = 2'-O-Methyl-cytidine
  modified_base 87: mod_base = OTHER; note = 2'-O-Methyl-guanosine
  modified_base 89: mod_base = OTHER; note = 2'-O-Methyl-guanosine
  modified_base 92: mod_base = OTHER; note = 2'-O-Methyl-guanosine
  modified_base 93: mod_base = OTHER; note = 2'-O-Methyl-guanosine
  modified_base 94: mod_base = OTHER; note = 2'-O-Methyl-uridine
  modified_base 95: mod_base = OTHER; note = 2'-O-Methyl-guanosine
  modified_base 96: mod_base = OTHER; note = 2'-O-Methyl-cytidine
  modified_base 97: mod_base = OTHER; note = 2'-O-Methyl-uridine
  modified_base 98: mod_base = OTHER; note = 2'-O-Methyl-uridine phosphorothioate
  modified_base 99: mod_base = OTHER; note = 2'-O-Methyl-uridine phosphorothioate
  modified_base 100: mod_base = OTHER; note = 2'-O-Methyl-uridine

SEQ ID NO: 2604 - RNA, 103 nt, synthetic construct; identical to SEQ ID NO: 1700
  source 1..103: mol_type = other RNA
  modified_base 1: mod_base = OTHER; note = 2'-O-Methyl-cytidine phosphorothioate
  modified_base 2: mod_base = OTHER; note = 2'-O-Methyl-adenosine phosphorothioate
  modified_base 3: mod_base = OTHER; note = 2'-O-Methyl-guanosine phosphorothioate
  modified_base 21: mod_base = OTHER; note = 2'-O-Methyl-guanosine
  modified_base 28: mod_base = OTHER; note = 2'-O-Methyl-adenosine
  modified_base 29: mod_base = OTHER; note = 2'-O-Methyl-guanosine
  modified_base 30: mod_base = OTHER; note = 2'-O-Methyl-cytidine
  modified_base 31: mod_base = OTHER; note = 2'-O-Methyl-uridine
  modified_base 32: mod_base = OTHER; note = 2'-O-Methyl-adenosine
  modified_base 33: mod_base = OTHER; note = 2'-O-Methyl-guanosine
  modified_base 34: mod_base = OTHER; note = 2'-O-Methyl-adenosine
  modified_base 35: mod_base = OTHER; note = 2'-O-Methyl-adenosine
  modified_base 36: mod_base = OTHER; note = 2'-O-Methyl-adenosine
  modified_base 37: mod_base = OTHER; note = 2'-O-Methyl-uridine
  modified_base 38: mod_base = OTHER; note = 2'-O-Methyl-adenosine
  modified_base 39: mod_base = OTHER; note = 2'-O-Methyl-guanosine
  modified_base 40: mod_base = OTHER; note = 2'-O-Methyl-cytidine
  modified_base 41: mod_base = OTHER; note = 2'-O-Methyl-adenosine
  modified_base 42: mod_base = OTHER; note = 2'-O-Methyl-adenosine
  modified_base 46: mod_base = OTHER; note = 2'-O-Methyl-adenosine
  modified_base 48: mod_base = OTHER; note = 2'-O-Methyl-adenosine
  modified_base 50: mod_base = OTHER; note = 2'-O-Methyl-uridine
  modified_base 52: mod_base = OTHER; note = 2'-O-Methyl-adenosine
  modified_base 53: mod_base = OTHER; note = 2'-O-Methyl-guanosine
  modified_base 54: mod_base = OTHER; note = 2'-O-Methyl-guanosine
  modified_base 55: mod_base = OTHER; note = 2'-O-Methyl-cytidine
  modified_base 56: mod_base = OTHER; note = 2'-O-Methyl-uridine
  modified_base 57: mod_base = OTHER; note = 2'-O-Methyl-adenosine
  modified_base 60: mod_base = OTHER; note = 2'-O-Methyl-cytidine
  modified_base 61: mod_base = OTHER; note = 2'-O-Methyl-cytidine
  modified_base 64: mod_base = OTHER; note = uridine phosphorothioate
  modified_base 66: mod_base = OTHER; note = 2'-O-Methyl-uridine
  modified_base 67: mod_base = OTHER; note = 2'-O-Methyl-cytidine
  modified_base 70: mod_base = OTHER; note = 2'-O-Methyl-cytidine
  modified_base 71: mod_base = OTHER; note = 2'-O-Methyl-uridine
  modified_base 72: mod_base = OTHER; note = 2'-O-Methyl-uridine
  modified_base 74: mod_base = OTHER; note = 2'-O-Methyl-adenosine
  modified_base 75: mod_base = OTHER; note = 2'-O-Methyl-adenosine
  modified_base 76: mod_base = OTHER; note = 2'-O-Methyl-adenosine
  modified_base 77: mod_base = OTHER; note = 2'-O-Methyl-adenosine
  modified_base 78: mod_base = OTHER; note = 2'-O-Methyl-adenosine
  modified_base 79: mod_base = OTHER; note = 2'-O-Methyl-guanosine
  modified_base 80: mod_base = OTHER; note = 2'-O-Methyl-uridine
  modified_base 82: mod_base = OTHER; note = 2'-O-Methyl-guanosine
  modified_base 83: mod_base = OTHER; note = 2'-O-Methyl-cytidine
  modified_base 84: mod_base = OTHER; note = 2'-O-Methyl-adenosine
  modified_base 85: mod_base = OTHER; note = 2'-O-Methyl-cytidine
  modified_base 86: mod_base = OTHER; note = 2'-O-Methyl-cytidine
  modified_base 87: mod_base = OTHER; note = 2'-O-Methyl-guanosine
  modified_base 89: mod_base = OTHER; note = 2'-O-Methyl-guanosine
  modified_base 92: mod_base = OTHER; note = 2'-O-Methyl-guanosine
  modified_base 93: mod_base = OTHER; note = 2'-O-Methyl-guanosine
  modified_base 94: mod_base = OTHER; note = 2'-O-Methyl-uridine
  modified_base 95: mod_base = OTHER; note = 2'-O-Methyl-guanosine
  modified_base 96: mod_base = OTHER; note = 2'-O-Methyl-cytidine
  modified_base 97: mod_base = OTHER; note = 2'-O-Methyl-uridine
  modified_base 98: mod_base = OTHER; note = 2'-O-Methyl-uridine phosphorothioate
  modified_base 99: mod_base = OTHER; note = 2'-O-Methyl-uridine phosphorothioate
  modified_base 100: mod_base = OTHER; note = 2'-O-Methyl-uridine

SEQ ID NO: 2605 - RNA, 103 nt, synthetic construct; identical to SEQ ID NO: 1700
  source 1..103: mol_type = other RNA
  modified_base 1: mod_base = OTHER; note = 2'-O-Methyl-cytidine phosphorothioate
  modified_base 2: mod_base = OTHER; note = 2'-O-Methyl-adenosine phosphorothioate
  modified_base 3: mod_base = OTHER; note = 2'-O-Methyl-guanosine phosphorothioate
  modified_base 21: mod_base = OTHER; note = 2'-O-Methyl-guanosine
  modified_base 28: mod_base = OTHER; note = 2'-O-Methyl-adenosine
  modified_base 29: mod_base = OTHER; note = 2'-O-Methyl-guanosine
  modified_base 30: mod_base = OTHER; note = 2'-O-Methyl-cytidine
  modified_base 31: mod_base = OTHER; note = 2'-O-Methyl-uridine
  modified_base 32: mod_base = OTHER; note = 2'-O-Methyl-adenosine
  modified_base 33: mod_base = OTHER; note = 2'-O-Methyl-guanosine
  modified_base 34: mod_base = OTHER; note = 2'-O-Methyl-adenosine
  modified_base 35: mod_base = OTHER; note = 2'-O-Methyl-adenosine
  modified_base 36: mod_base = OTHER; note = 2'-O-Methyl-adenosine
  modified_base 37: mod_base = OTHER; note = 2'-O-Methyl-uridine
  modified_base 38: mod_base = OTHER; note = 2'-O-Methyl-adenosine
  modified_base 39: mod_base = OTHER; note = 2'-O-Methyl-guanosine
  modified_base 40: mod_base = OTHER; note = 2'-O-Methyl-cytidine
  modified_base 41: mod_base = OTHER; note = 2'-O-Methyl-adenosine
  modified_base 42: mod_base = OTHER; note = 2'-O-Methyl-adenosine
  modified_base 46: mod_base = OTHER; note = 2'-O-Methyl-adenosine
  modified_base 48: mod_base = OTHER; note = 2'-O-Methyl-adenosine
  modified_base 50: mod_base = OTHER; note = 2'-O-Methyl-uridine
  modified_base 52: mod_base = OTHER; note = 2'-O-Methyl-adenosine
  modified_base 53: mod_base = OTHER; note = 2'-O-Methyl-guanosine
  modified_base 54: mod_base = OTHER; note = 2'-O-Methyl-guanosine
  modified_base 57: mod_base = OTHER; note = 2'-O-Methyl-adenosine
  modified_base 61: mod_base = OTHER; note = 2'-O-Methyl-cytidine
  modified_base 64: mod_base = OTHER; note = uridine phosphorothioate
  modified_base 66: mod_base = OTHER; note = 2'-O-Methyl-uridine
  modified_base 67: mod_base = OTHER; note = 2'-O-Methyl-cytidine
  modified_base 70: mod_base = OTHER; note = 2'-O-Methyl-cytidine
  modified_base 71: mod_base = OTHER; note = 2'-O-Methyl-uridine
  modified_base 72: mod_base = OTHER; note = 2'-O-Methyl-uridine
  modified_base 73: mod_base = OTHER; note = 2'-O-Methyl-guanosine
  modified_base 74: mod_base = OTHER; note = 2'-O-Methyl-adenosine
  modified_base 75: mod_base = OTHER; note = 2'-O-Methyl-adenosine
  modified_base 76: mod_base = OTHER; note = 2'-O-Methyl-adenosine
  modified_base 77: mod_base = OTHER; note = 2'-O-Methyl-adenosine
  modified_base 78: mod_base = OTHER; note = 2'-O-Methyl-adenosine
  modified_base 79: mod_base = OTHER; note = 2'-O-Methyl-guanosine
  modified_base 80: mod_base = OTHER; note = 2'-O-Methyl-uridine
  modified_base 82: mod_base = OTHER; note = 2'-O-Methyl-guanosine
  modified_base 83: mod_base = OTHER; note = 2'-O-Methyl-cytidine
  modified_base 84: mod_base = OTHER; note = 2'-O-Methyl-adenosine
  modified_base 85: mod_base = OTHER; note = 2'-O-Methyl-cytidine
  modified_base 86: mod_base = OTHER; note = 2'-O-Methyl-cytidine
  modified_base 87: mod_base = OTHER; note = 2'-O-Methyl-guanosine
  modified_base 89: mod_base = OTHER; note = 2'-O-Methyl-guanosine
  modified_base 92: mod_base = OTHER; note = 2'-O-Methyl-guanosine
  modified_base 93: mod_base = OTHER; note = 2'-O-Methyl-guanosine
  modified_base 94: mod_base = OTHER; note = 2'-O-Methyl-uridine
  modified_base 95: mod_base = OTHER; note = 2'-O-Methyl-guanosine
  modified_base 96: mod_base = OTHER; note = 2'-O-Methyl-cytidine
  modified_base 97: mod_base = OTHER; note = 2'-O-Methyl-uridine
  modified_base 98: mod_base = OTHER; note = 2'-O-Methyl-uridine phosphorothioate
  modified_base 99: mod_base = OTHER; note = 2'-O-Methyl-uridine phosphorothioate
  modified_base 100: mod_base = OTHER; note = 2'-O-Methyl-uridine

SEQ ID NO: 2606 - RNA, 103 nt, synthetic construct; identical to SEQ ID NO: 1700
  source 1..103: mol_type = other RNA
  modified_base 1: mod_base = OTHER; note = 2'-O-Methyl-cytidine phosphorothioate
  modified_base 2: mod_base = OTHER; note = 2'-O-Methyl-adenosine phosphorothioate
  modified_base 3: mod_base = OTHER; note = 2'-O-Methyl-guanosine phosphorothioate
  modified_base 21: mod_base = OTHER; note = 2'-O-Methyl-guanosine
  modified_base 28: mod_base = OTHER; note = 2'-O-Methyl-adenosine
  modified_base 29: mod_base = OTHER; note = 2'-O-Methyl-guanosine
  modified_base 30: mod_base = OTHER; note = 2'-O-Methyl-cytidine
  modified_base 31: mod_base = OTHER; note = 2'-O-Methyl-uridine
  modified_base 32: mod_base = OTHER; note = 2'-O-Methyl-adenosine
  modified_base 33: mod_base = OTHER; note = 2'-O-Methyl-guanosine
  modified_base 34: mod_base = OTHER; note = 2'-O-Methyl-adenosine
  modified_base 35: mod_base = OTHER; note = 2'-O-Methyl-adenosine
  modified_base 36: mod_base = OTHER; note = 2'-O-Methyl-adenosine
  modified_base 37: mod_base = OTHER; note = 2'-O-Methyl-uridine
  modified_base 38: mod_base = OTHER; note = 2'-O-Methyl-adenosine
  modified_base 39: mod_base = OTHER; note = 2'-O-Methyl-guanosine
  modified_base 40: mod_base = OTHER; note = 2'-O-Methyl-cytidine
  modified_base 41: mod_base = OTHER; note = 2'-O-Methyl-adenosine
  modified_base 42: mod_base = OTHER; note = 2'-O-Methyl-adenosine
  modified_base 46: mod_base = OTHER; note = 2'-O-Methyl-adenosine
  modified_base 48: mod_base = OTHER; note = 2'-O-Methyl-adenosine
  modified_base 50: mod_base = OTHER; note = 2'-O-Methyl-uridine
  modified_base 52: mod_base = OTHER; note = 2'-O-Methyl-adenosine
  modified_base 53: mod_base = OTHER; note = 2'-O-Methyl-guanosine
  modified_base 54: mod_base = OTHER; note = 2'-O-Methyl-guanosine
  modified_base 57: mod_base = OTHER; note = 2'-O-Methyl-adenosine
  modified_base 61: mod_base = OTHER; note = 2'-O-Methyl-cytidine
  modified_base 64: mod_base = OTHER; note = uridine phosphorothioate
  modified_base 66: mod_base = OTHER; note = 2'-O-Methyl-uridine
  modified_base 67: mod_base = OTHER; note = 2'-O-Methyl-cytidine
  modified_base 70: mod_base = OTHER; note = 2'-O-Methyl-cytidine
  modified_base 71: mod_base = OTHER; note = 2'-O-Methyl-uridine
  modified_base 72: mod_base = OTHER; note = 2'-O-Methyl-uridine
  modified_base 73: mod_base = OTHER; note = 2'-O-Methyl-guanosine
  modified_base 74: mod_base = OTHER; note = 2'-O-Methyl-adenosine
  modified_base 75: mod_base = OTHER; note = 2'-O-Methyl-adenosine
  modified_base 76: mod_base = OTHER; note = 2'-O-Methyl-adenosine
  modified_base 77: mod_base = OTHER; note = 2'-O-Methyl-adenosine
  modified_base 78: mod_base = OTHER; note = 2'-O-Methyl-adenosine
  modified_base 79: mod_base = OTHER; note = 2'-O-Methyl-guanosine
  modified_base 80: mod_base = OTHER; note = 2'-O-Methyl-uridine
  modified_base 82: mod_base = OTHER; note = 2'-O-Methyl-guanosine
  modified_base 83: mod_base = OTHER; note = 2'-O-Methyl-cytidine
  modified_base 84: mod_base = OTHER; note = 2'-O-Methyl-adenosine
  modified_base 85: mod_base = OTHER; note = 2'-O-Methyl-cytidine
  modified_base 86: mod_base = OTHER; note = 2'-O-Methyl-cytidine
  modified_base 87: mod_base = OTHER; note = 2'-O-Methyl-guanosine
  modified_base 89: mod_base = OTHER; note = 2'-O-Methyl-guanosine
  modified_base 91: mod_base = OTHER; note = 2'-O-Methyl-cytidine
  modified_base 92: mod_base = OTHER; note = 2'-O-Methyl-guanosine
  modified_base 93: mod_base = OTHER; note = 2'-O-Methyl-guanosine
  modified_base 94: mod_base = OTHER; note = 2'-O-Methyl-uridine
  modified_base 95: mod_base = OTHER; note = 2'-O-Methyl-guanosine
  modified_base 96: mod_base = OTHER; note = 2'-O-Methyl-cytidine
  modified_base 97: mod_base = OTHER; note = 2'-O-Methyl-uridine
  modified_base 98: mod_base = OTHER; note = 2'-O-Methyl-uridine phosphorothioate
  modified_base 99: mod_base = OTHER; note = 2'-O-Methyl-uridine phosphorothioate
  modified_base 100: mod_base = OTHER; note = 2'-O-Methyl-uridine

SEQ ID NO: 2607 - RNA, 103 nt, synthetic construct; identical to SEQ ID NO: 1700
  source 1..103: mol_type = other RNA
  modified_base 1: mod_base = OTHER; note = 2'-O-Methyl-cytidine phosphorothioate
  modified_base 2: mod_base = OTHER; note = 2'-O-Methyl-adenosine phosphorothioate
  modified_base 3: mod_base = OTHER; note = 2'-O-Methyl-guanosine phosphorothioate
  modified_base 21: mod_base = OTHER; note = 2'-O-Methyl-guanosine
  modified_base 28: mod_base = OTHER; note = 2'-O-Methyl-adenosine
  modified_base 29: mod_base = OTHER; note = 2'-O-Methyl-guanosine
  modified_base 30: mod_base = OTHER; note = 2'-O-Methyl-cytidine
  modified_base 31: mod_base = OTHER; note = 2'-O-Methyl-uridine
  modified_base 32: mod_base = OTHER; note = 2'-O-Methyl-adenosine
  modified_base 34: mod_base = OTHER; note = 2'-O-Methyl-adenosine
  modified_base 35: mod_base = OTHER; note = 2'-O-Methyl-adenosine
  modified_base 36: mod_base = OTHER; note = 2'-O-Methyl-adenosine
  modified_base 37: mod_base = OTHER; note = 2'-O-Methyl-uridine
  modified_base 38: mod_base = OTHER; note = 2'-O-Methyl-adenosine
  modified_base 39: mod_base = OTHER; note = 2'-O-Methyl-guanosine
  modified_base 40: mod_base = OTHER; note = 2'-O-Methyl-cytidine
  modified_base 41: mod_base = OTHER; note = 2'-O-Methyl-adenosine
  modified_base 42: mod_base = OTHER; note = 2'-O-Methyl-adenosine
  modified_base 46: mod_base = OTHER; note = 2'-O-Methyl-adenosine
  modified_base 48: mod_base = OTHER; note = 2'-O-Methyl-adenosine
  modified_base 50: mod_base = OTHER; note = 2'-O-Methyl-uridine
  modified_base 52: mod_base = OTHER; note = 2'-O-Methyl-adenosine
  modified_base 53: mod_base = OTHER; note = 2'-O-Methyl-guanosine
  modified_base 54: mod_base = OTHER; note = 2'-O-Methyl-guanosine
  modified_base 57: mod_base = OTHER; note = 2'-O-Methyl-adenosine
  modified_base 61: mod_base = OTHER; note = 2'-O-Methyl-cytidine
  modified_base 64: mod_base = OTHER; note = uridine phosphorothioate
  modified_base 66: mod_base = OTHER; note = 2'-O-Methyl-uridine
  modified_base 67: mod_base = OTHER; note = 2'-O-Methyl-cytidine
  modified_base 70: mod_base = OTHER; note = 2'-O-Methyl-cytidine
  modified_base 71: mod_base = OTHER; note = 2'-O-Methyl-uridine
  modified_base 72: mod_base = OTHER; note = 2'-O-Methyl-uridine
  modified_base 73: mod_base = OTHER; note = 2'-O-Methyl-guanosine
  modified_base 74: mod_base = OTHER; note = 2'-O-Methyl-adenosine
  modified_base 75: mod_base = OTHER; note = 2'-O-Methyl-adenosine
  modified_base 76: mod_base = OTHER; note = 2'-O-Methyl-adenosine
  modified_base 77: mod_base = OTHER; note = 2'-O-Methyl-adenosine
  modified_base 78: mod_base = OTHER; note = 2'-O-Methyl-adenosine
  modified_base 79: mod_base = OTHER; note = 2'-O-Methyl-guanosine
  modified_base 80: mod_base = OTHER; note = 2'-O-Methyl-uridine
  modified_base 82: mod_base = OTHER; note = 2'-O-Methyl-guanosine
  modified_base 83: mod_base = OTHER; note = 2'-O-Methyl-cytidine
  modified_base 84: mod_base = OTHER; note = 2'-O-Methyl-adenosine
  modified_base 85: mod_base = OTHER; note = 2'-O-Methyl-cytidine
  modified_base 86: mod_base = OTHER; note = 2'-O-Methyl-cytidine
  modified_base 87: mod_base = OTHER; note = 2'-O-Methyl-guanosine
  modified_base 89: mod_base = OTHER; note = 2'-O-Methyl-guanosine
  modified_base 92: mod_base = OTHER; note = 2'-O-Methyl-guanosine
  modified_base 93: mod_base = OTHER; note = 2'-O-Methyl-guanosine
  modified_base 94: mod_base = OTHER; note = 2'-O-Methyl-uridine
  modified_base 95: mod_base = OTHER; note = 2'-O-Methyl-guanosine
  modified_base 96: mod_base = OTHER; note = 2'-O-Methyl-cytidine
  modified_base 97: mod_base = OTHER; note = 2'-O-Methyl-uridine
  modified_base 98: mod_base = OTHER; note = 2'-O-Methyl-uridine phosphorothioate
  modified_base 99: mod_base = OTHER; note = 2'-O-Methyl-uridine phosphorothioate
  modified_base 100: mod_base = OTHER; note = 2'-O-Methyl-uridine

SEQ ID NO: 2608 - RNA, 103 nt, synthetic construct; identical to SEQ ID NO: 1700
  source 1..103: mol_type = other RNA
  modified_base 1: mod_base = OTHER; note = 2'-O-Methyl-cytidine phosphorothioate
  modified_base 2: mod_base = OTHER; note = 2'-O-Methyl-adenosine phosphorothioate
  modified_base 3: mod_base = OTHER; note = 2'-O-Methyl-guanosine phosphorothioate
  modified_base 21: mod_base = OTHER; note = 2'-O-Methyl-guanosine
  modified_base 28: mod_base = OTHER; note = 2'-O-Methyl-adenosine
  modified_base 29: mod_base = OTHER; note = 2'-O-Methyl-guanosine
  modified_base 30: mod_base = OTHER; note = 2'-O-Methyl-cytidine
  modified_base 31: mod_base = OTHER; note = 2'-O-Methyl-uridine
  modified_base 32: mod_base = OTHER; note = 2'-O-Methyl-adenosine
  modified_base 34: mod_base = OTHER; note = 2'-O-Methyl-adenosine
  modified_base 35: mod_base = OTHER; note = 2'-O-Methyl-adenosine
  modified_base 36: mod_base = OTHER; note = 2'-O-Methyl-adenosine
  modified_base 37: mod_base = OTHER; note = 2'-O-Methyl-uridine
  modified_base 38: mod_base = OTHER; note = 2'-O-Methyl-adenosine
  modified_base 39: mod_base = OTHER; note = 2'-O-Methyl-guanosine
  modified_base 40: mod_base = OTHER; note = 2'-O-Methyl-cytidine
  modified_base 41: mod_base = OTHER; note = 2'-O-Methyl-adenosine
  modified_base 42: mod_base = OTHER; note = 2'-O-Methyl-adenosine
  modified_base 46: mod_base = OTHER; note = 2'-O-Methyl-adenosine
  modified_base 48: mod_base = OTHER; note = 2'-O-Methyl-adenosine
  modified_base 50: mod_base = OTHER; note = 2'-O-Methyl-uridine
  modified_base 52: mod_base = OTHER; note = 2'-O-Methyl-adenosine
  modified_base 53: mod_base = OTHER; note = 2'-O-Methyl-guanosine
  modified_base 54: mod_base = OTHER; note = 2'-O-Methyl-guanosine
  modified_base 57: mod_base = OTHER; note = 2'-O-Methyl-adenosine
  modified_base 61: mod_base = OTHER; note = 2'-O-Methyl-cytidine
  modified_base 64: mod_base = OTHER; note = uridine phosphorothioate
  modified_base 66: mod_base = OTHER; note = 2'-O-Methyl-uridine
  modified_base 67: mod_base = OTHER; note = 2'-O-Methyl-cytidine
  modified_base 70: mod_base = OTHER; note = 2'-O-Methyl-cytidine
  modified_base 71: mod_base = OTHER; note = 2'-O-Methyl-uridine
  modified_base 72: mod_base = OTHER; note = 2'-O-Methyl-uridine
  modified_base 73: mod_base = OTHER; note = 2'-O-Methyl-guanosine
  modified_base 74: mod_base = OTHER; note = 2'-O-Methyl-adenosine
  modified_base 75: mod_base = OTHER; note = 2'-O-Methyl-adenosine
  modified_base 76: mod_base = OTHER; note = 2'-O-Methyl-adenosine
  modified_base 77: mod_base = OTHER; note = 2'-O-Methyl-adenosine
  modified_base 78: mod_base = OTHER; note = 2'-O-Methyl-adenosine
  modified_base 79: mod_base = OTHER; note = 2'-O-Methyl-guanosine
  modified_base 80: mod_base = OTHER; note = 2'-O-Methyl-uridine
  modified_base 82: mod_base = OTHER; note = 2'-O-Methyl-guanosine
  modified_base 83: mod_base = OTHER; note = 2'-O-Methyl-cytidine
  modified_base 84: mod_base = OTHER; note = 2'-O-Methyl-adenosine
  modified_base 85: mod_base = OTHER; note = 2'-O-Methyl-cytidine
  modified_base 86: mod_base = OTHER; note = 2'-O-Methyl-cytidine
  modified_base 87: mod_base = OTHER; note = 2'-O-Methyl-guanosine
  modified_base 89: mod_base = OTHER; note = 2'-O-Methyl-guanosine
  modified_base 91: mod_base = OTHER; note = 2'-O-Methyl-cytidine
  modified_base 92: mod_base = OTHER; note = 2'-O-Methyl-guanosine
  modified_base 93: mod_base = OTHER; note = 2'-O-Methyl-guanosine
  modified_base 94: mod_base = OTHER; note = 2'-O-Methyl-uridine
  modified_base 95: mod_base = OTHER; note = 2'-O-Methyl-guanosine
  modified_base 96: mod_base = OTHER; note = 2'-O-Methyl-cytidine
  modified_base 97: mod_base = OTHER; note = 2'-O-Methyl-uridine
  modified_base 98: mod_base = OTHER; note = 2'-O-Methyl-uridine phosphorothioate
  modified_base 99: mod_base = OTHER; note = 2'-O-Methyl-uridine phosphorothioate
  modified_base 100: mod_base = OTHER; note = 2'-O-Methyl-uridine

SEQ ID NO: 2609 - RNA, 103 nt, synthetic construct; identical to SEQ ID NO: 1700
  source 1..103: mol_type = other RNA
  modified_base 1: mod_base = OTHER; note = 2'-O-Methyl-cytidine phosphorothioate
  modified_base 2: mod_base = OTHER; note = 2'-O-Methyl-adenosine phosphorothioate
  modified_base 3: mod_base = OTHER; note = 2'-O-Methyl-guanosine phosphorothioate
  modified_base 21: mod_base = OTHER; note = 2'-O-Methyl-guanosine
  modified_base 28: mod_base = OTHER; note = 2'-O-Methyl-adenosine
  modified_base 29: mod_base = OTHER; note = 2'-O-Methyl-guanosine
  modified_base 30: mod_base = OTHER; note = 2'-O-Methyl-cytidine
  modified_base 31: mod_base = OTHER; note = 2'-O-Methyl-uridine
  modified_base 32: mod_base = OTHER; note = 2'-O-Methyl-adenosine
  modified_base 34: mod_base = OTHER; note = 2'-O-Methyl-adenosine
  modified_base 35: mod_base = OTHER; note = 2'-O-Methyl-adenosine
  modified_base 36: mod_base = OTHER; note = 2'-O-Methyl-adenosine
  modified_base 37: mod_base = OTHER; note = 2'-O-Methyl-uridine
  modified_base 38: mod_base = OTHER; note = 2'-O-Methyl-adenosine
  modified_base 39: mod_base = OTHER; note = 2'-O-Methyl-guanosine
  modified_base 40: mod_base = OTHER; note = 2'-O-Methyl-cytidine
  modified_base 41: mod_base = OTHER; note = 2'-O-Methyl-adenosine
  modified_base 42: mod_base = OTHER; note = 2'-O-Methyl-adenosine
  modified_base 46: mod_base = OTHER; note = 2'-O-Methyl-adenosine
  modified_base 48: mod_base = OTHER; note = 2'-O-Methyl-adenosine
  modified_base 50: mod_base = OTHER; note = 2'-O-Methyl-uridine
  modified_base 52: mod_base = OTHER; note = 2'-O-Methyl-adenosine
  modified_base 53: mod_base = OTHER; note = 2'-O-Methyl-guanosine
  modified_base 54: mod_base = OTHER; note = 2'-O-Methyl-guanosine
  modified_base 55: mod_base = OTHER; note = 2'-O-Methyl-cytidine
  modified_base 56: mod_base = OTHER; note = 2'-O-Methyl-uridine
  modified_base 57: mod_base = OTHER; note = 2'-O-Methyl-adenosine
  modified_base 60: mod_base = OTHER; note = 2'-O-Methyl-cytidine
  modified_base 61: mod_base = OTHER; note = 2'-O-Methyl-cytidine
  modified_base 64: mod_base = OTHER; note = uridine phosphorothioate
  modified_base 66: mod_base = OTHER; note = 2'-O-Methyl-uridine
  modified_base 67: mod_base = OTHER; note = 2'-O-Methyl-cytidine
  modified_base 70: mod_base = OTHER; note = 2'-O-Methyl-cytidine
  modified_base 71: mod_base = OTHER; note = 2'-O-Methyl-uridine
  modified_base 72: mod_base = OTHER; note = 2'-O-Methyl-uridine
  modified_base 74: mod_base = OTHER; note = 2'-O-Methyl-adenosine
  modified_base 75: mod_base = OTHER; note = 2'-O-Methyl-adenosine
  modified_base 76: mod_base = OTHER; note = 2'-O-Methyl-adenosine
  modified_base 77: mod_base = OTHER; note = 2'-O-Methyl-adenosine
  modified_base 78: mod_base = OTHER; note = 2'-O-Methyl-adenosine
  modified_base 79: mod_base = OTHER; note = 2'-O-Methyl-guanosine
  modified_base 80: mod_base = OTHER; note = 2'-O-Methyl-uridine
  modified_base 82: mod_base = OTHER; note = 2'-O-Methyl-guanosine
  modified_base 83: mod_base = OTHER; note = 2'-O-Methyl-cytidine
  modified_base 84: mod_base = OTHER; note = 2'-O-Methyl-adenosine
  modified_base 85: mod_base = OTHER; note = 2'-O-Methyl-cytidine
  modified_base 86: mod_base = OTHER; note = 2'-O-Methyl-cytidine
  modified_base 87: mod_base = OTHER; note = 2'-O-Methyl-guanosine
  modified_base 89: mod_base = OTHER; note = 2'-O-Methyl-guanosine
  modified_base 92: mod_base = OTHER; note = 2'-O-Methyl-guanosine
  modified_base 93: mod_base = OTHER; note = 2'-O-Methyl-guanosine
  modified_base 94: mod_base = OTHER; note = 2'-O-Methyl-uridine
  modified_base 95: mod_base = OTHER; note = 2'-O-Methyl-guanosine
  modified_base 96: mod_base = OTHER; note = 2'-O-Methyl-cytidine
  modified_base 97: mod_base = OTHER; note = 2'-O-Methyl-uridine
  modified_base 98: mod_base = OTHER; note = 2'-O-Methyl-uridine phosphorothioate
  modified_base 99: mod_base = OTHER; note = 2'-O-Methyl-uridine phosphorothioate
  modified_base 100: mod_base = OTHER; note = 2'-O-Methyl-uridine

SEQ ID NO: 2610 - RNA, 103 nt, synthetic construct; identical to SEQ ID NO: 1643
  source 1..103: mol_type = other RNA
  modified_base 1: mod_base = OTHER; note = 2'-O-Methyl-cytidine phosphorothioate
  modified_base 2: mod_base = OTHER; note = 2'-O-Methyl-cytidine phosphorothioate
  modified_base 3: mod_base = OTHER; note = 2'-O-Methyl-cytidine phosphorothioate
  modified_base 21: mod_base = OTHER; note = 2'-O-Methyl-guanosine
  modified_base 28: mod_base = OTHER; note = 2'-O-Methyl-adenosine
  modified_base 29: mod_base = OTHER; note = 2'-O-Methyl-guanosine
  modified_base 30: mod_base = OTHER; note = 2'-O-Methyl-cytidine
  modified_base 31: mod_base = OTHER; note = 2'-O-Methyl-uridine
  modified_base 32: mod_base = OTHER; note = 2'-O-Methyl-adenosine
  modified_base 34: mod_base = OTHER; note = 2'-O-Methyl-adenosine
  modified_base 35: mod_base = OTHER; note = 2'-O-Methyl-adenosine
  modified_base 36: mod_base = OTHER; note = 2'-O-Methyl-adenosine
  modified_base 37: mod_base = OTHER; note = 2'-O-Methyl-uridine
  modified_base 38: mod_base = OTHER; note = 2'-O-Methyl-adenosine
  modified_base 39: mod_base = OTHER; note = 2'-O-Methyl-guanosine
  modified_base 40: mod_base = OTHER; note = 2'-O-Methyl-cytidine
  modified_base 41: mod_base = OTHER; note = 2'-O-Methyl-adenosine
  modified_base 42: mod_base = OTHER; note = 2'-O-Methyl-adenosine
  modified_base 45: mod_base = OTHER; note = uridine phosphorothioate
  modified_base 46: mod_base = OTHER; note = 2'-O-Methyl-adenosine
  modified_base 48: mod_base = OTHER; note = 2'-O-Methyl-adenosine
  modified_base 50: mod_base = OTHER; note = 2'-O-Methyl-uridine
  modified_base 52: mod_base = OTHER; note = 2'-O-Methyl-adenosine
  modified_base 53: mod_base = OTHER; note = 2'-O-Methyl-guanosine
  modified_base 54: mod_base = OTHER; note = 2'-O-Methyl-guanosine
  modified_base 57: mod_base = OTHER; note = 2'-O-Methyl-adenosine
  modified_base 61: mod_base = OTHER; note = 2'-O-Methyl-cytidine
  modified_base 66: mod_base = OTHER; note = 2'-O-Methyl-uridine
  modified_base 67: mod_base = OTHER; note = 2'-O-Methyl-cytidine
  modified_base 70: mod_base = OTHER; note = 2'-O-Methyl-cytidine
  modified_base 71: mod_base = OTHER; note = 2'-O-Methyl-uridine
  modified_base 72: mod_base = OTHER; note = 2'-O-Methyl-uridine
  modified_base 74: mod_base = OTHER; note = 2'-O-Methyl-adenosine
  modified_base 75: mod_base = OTHER; note = 2'-O-Methyl-adenosine
  modified_base 76: mod_base = OTHER; note = 2'-O-Methyl-adenosine
  modified_base 77: mod_base = OTHER; note = 2'-O-Methyl-adenosine
  modified_base 78: mod_base = OTHER; note = 2'-O-Methyl-adenosine
  modified_base 79: mod_base = OTHER; note = 2'-O-Methyl-guanosine
  modified_base 80: mod_base = OTHER; note = 2'-O-Methyl-uridine
  modified_base 82: mod_base = OTHER; note = 2'-O-Methyl-guanosine
  modified_base 83: mod_base = OTHER; note = 2'-O-Methyl-cytidine
  modified_base 84: mod_base = OTHER; note = 2'-O-Methyl-adenosine
  modified_base 85: mod_base = OTHER; note = 2'-O-Methyl-cytidine
  modified_base 86: mod_base = OTHER; note = 2'-O-Methyl-cytidine
  modified_base 87: mod_base = OTHER; note = 2'-O-Methyl-guanosine
  modified_base 89: mod_base = OTHER; note = 2'-O-Methyl-guanosine
  modified_base 92: mod_base = OTHER; note = 2'-O-Methyl-guanosine
  modified_base 93: mod_base = OTHER; note = 2'-O-Methyl-guanosine
  modified_base 94: mod_base = OTHER; note = 2'-O-Methyl-uridine
  modified_base 95: mod_base = OTHER; note = 2'-O-Methyl-guanosine
  modified_base 96: mod_base = OTHER; note = 2'-O-Methyl-cytidine
  modified_base 97: mod_base = OTHER; note = 2'-O-Methyl-uridine
  modified_base 98: mod_base = OTHER; note = 2'-O-Methyl-uridine phosphorothioate
  modified_base 99: mod_base = OTHER; note = 2'-O-Methyl-uridine phosphorothioate
  modified_base 100: mod_base = OTHER; note = 2'-O-Methyl-uridine

SEQ ID NO: 2611 - RNA, 103 nt, synthetic construct; identical to SEQ ID NO: 1643
  source 1..103: mol_type = other RNA
  modified_base 1: mod_base = OTHER; note = 2'-O-Methyl-cytidine phosphorothioate
  modified_base 2: mod_base = OTHER; note = 2'-O-Methyl-cytidine phosphorothioate
  modified_base 3: mod_base = OTHER; note = 2'-O-Methyl-cytidine phosphorothioate
  modified_base 21: mod_base = OTHER; note = 2'-O-Methyl-guanosine
  modified_base 28: mod_base = OTHER; note = 2'-O-Methyl-adenosine
  modified_base 29: mod_base = OTHER; note = 2'-O-Methyl-guanosine
  modified_base 30: mod_base = OTHER; note = 2'-O-Methyl-cytidine
  modified_base 31: mod_base = OTHER; note = 2'-O-Methyl-uridine
  modified_base 32: mod_base = OTHER; note = 2'-O-Methyl-adenosine
  modified_base 33: mod_base = OTHER; note = 2'-O-Methyl-guanosine
  modified_base 34: mod_base = OTHER; note = 2'-O-Methyl-adenosine
  modified_base 35: mod_base = OTHER; note = 2'-O-Methyl-adenosine
  modified_base 36: mod_base = OTHER; note = 2'-O-Methyl-adenosine
  modified_base 37: mod_base = OTHER; note = 2'-O-Methyl-uridine
  modified_base 38: mod_base = OTHER; note = 2'-O-Methyl-adenosine
  modified_base 39: mod_base = OTHER; note = 2'-O-Methyl-guanosine
  modified_base 40: mod_base = OTHER; note = 2'-O-Methyl-cytidine
  modified_base 41: mod_base = OTHER; note = 2'-O-Methyl-adenosine
  modified_base 42: mod_base = OTHER; note = 2'-O-Methyl-adenosine
  modified_base 45: mod_base = OTHER; note = uridine phosphorothioate
  modified_base 46: mod_base = OTHER; note = 2'-O-Methyl-adenosine
  modified_base 48: mod_base = OTHER; note = 2'-O-Methyl-adenosine
  modified_base 50: mod_base = OTHER; note = 2'-O-Methyl-uridine
  modified_base 52: mod_base = OTHER; note = 2'-O-Methyl-adenosine
  modified_base 53: mod_base = OTHER; note = 2'-O-Methyl-guanosine
  modified_base 54: mod_base = OTHER; note = 2'-O-Methyl-guanosine
  modified_base 55: mod_base = OTHER; note = 2'-O-Methyl-cytidine
  modified_base 56: mod_base = OTHER; note = 2'-O-Methyl-uridine
  modified_base 57: mod_base = OTHER; note = 2'-O-Methyl-adenosine
  modified_base 60: mod_base = OTHER; note = 2'-O-Methyl-cytidine
  modified_base 61: mod_base = OTHER; note = 2'-O-Methyl-cytidine
  modified_base 66: mod_base = OTHER; note = 2'-O-Methyl-uridine
  modified_base 67: mod_base = OTHER; note = 2'-O-Methyl-cytidine
  modified_base 70: mod_base = OTHER; note = 2'-O-Methyl-cytidine
  modified_base 71: mod_base = OTHER; note = 2'-O-Methyl-uridine
  modified_base 72: mod_base = OTHER; note = 2'-O-Methyl-uridine
  modified_base 73: mod_base = OTHER; note = 2'-O-Methyl-guanosine
  modified_base 74: mod_base = OTHER; note = 2'-O-Methyl-adenosine
  modified_base 75: mod_base = OTHER; note = 2'-O-Methyl-adenosine
  modified_base 76: mod_base = OTHER; note = 2'-O-Methyl-adenosine
  modified_base 77: mod_base = OTHER; note = 2'-O-Methyl-adenosine
  modified_base 78: mod_base = OTHER; note = 2'-O-Methyl-adenosine
  modified_base 79: mod_base = OTHER; note = 2'-O-Methyl-guanosine
  modified_base 80: mod_base = OTHER; note = 2'-O-Methyl-uridine
  modified_base 81: mod_base = OTHER; note = 2'-O-Methyl-guanosine
  modified_base 83: mod_base = OTHER; note = 2'-O-Methyl-cytidine
  modified_base 84: mod_base = OTHER; note = 2'-O-Methyl-adenosine
  modified_base 85: mod_base = OTHER; note = 2'-O-Methyl-cytidine
  modified_base 86: mod_base = OTHER; note = 2'-O-Methyl-cytidine
  modified_base 87: mod_base = OTHER; note = 2'-O-Methyl-guanosine
  modified_base 88: mod_base = OTHER; note = 2'-O-Methyl-adenosine
  modified_base 89: mod_base = OTHER; note = 2'-O-Methyl-guanosine
  modified_base 90: mod_base = OTHER; note = 2'-O-Methyl-uridine
  modified_base 91: mod_base = OTHER; note = 2'-O-Methyl-cytidine
  modified_base 92: mod_base = OTHER; note = 2'-O-Methyl-guanosine
  modified_base 93: mod_base = OTHER; note = 2'-O-Methyl-guanosine
  modified_base 94: mod_base = OTHER; note = 2'-O-Methyl-uridine
  modified_base 95: mod_base = OTHER; note = 2'-O-Methyl-guanosine
  modified_base 96: mod_base = OTHER; note = 2'-O-Methyl-cytidine
  modified_base 97: mod_base = OTHER; note = 2'-O-Methyl-uridine
  modified_base 98: mod_base = OTHER; note = 2'-O-Methyl-uridine phosphorothioate
  modified_base 99: mod_base = OTHER; note = 2'-O-Methyl-uridine phosphorothioate
  modified_base 100: mod_base = OTHER; note = 2'-O-Methyl-uridine

SEQ ID NO: 2612 - RNA, 103 nt, synthetic construct; identical to SEQ ID NO: 1643
  source 1..103: mol_type = other RNA
  modified_base 1: mod_base = OTHER; note = 2'-O-Methyl-cytidine phosphorothioate
  modified_base 2: mod_base = OTHER; note = 2'-O-Methyl-cytidine phosphorothioate
  modified_base 3: mod_base = OTHER; note = 2'-O-Methyl-cytidine phosphorothioate
  modified_base 21: mod_base = OTHER; note = 2'-O-Methyl-guanosine
  modified_base 28: mod_base = OTHER; note = 2'-O-Methyl-adenosine
  modified_base 29: mod_base = OTHER; note = 2'-O-Methyl-guanosine
  modified_base 30: mod_base = OTHER; note = 2'-O-Methyl-cytidine
  modified_base 31: mod_base = OTHER; note = 2'-O-Methyl-uridine
  modified_base 32: mod_base = OTHER; note = 2'-O-Methyl-adenosine
  modified_base 34: mod_base = OTHER; note = 2'-O-Methyl-adenosine
  modified_base 35: mod_base = OTHER; note = 2'-O-Methyl-adenosine
  modified_base 36: mod_base = OTHER; note = 2'-O-Methyl-adenosine
  modified_base 37: mod_base = OTHER; note = 2'-O-Methyl-uridine
  modified_base 38: mod_base = OTHER; note = 2'-O-Methyl-adenosine
  modified_base 39: mod_base = OTHER; note = 2'-O-Methyl-guanosine
  modified_base 40: mod_base = OTHER; note = 2'-O-Methyl-cytidine
  modified_base 41: mod_base = OTHER; note = 2'-O-Methyl-adenosine
  modified_base 42: mod_base = OTHER; note = 2'-O-Methyl-adenosine
  modified_base 45: mod_base = OTHER; note = uridine phosphorothioate
  modified_base 46: mod_base = OTHER; note = 2'-O-Methyl-adenosine
  modified_base 48: mod_base = OTHER; note = 2'-O-Methyl-adenosine
  modified_base 50: mod_base = OTHER; note = 2'-O-Methyl-uridine
  modified_base 52: mod_base = OTHER; note = 2'-O-Methyl-adenosine
  modified_base 53: mod_base = OTHER; note = 2'-O-Methyl-guanosine
  modified_base 54: mod_base = OTHER; note = 2'-O-Methyl-guanosine
  modified_base 55: mod_base = OTHER; note = 2'-O-Methyl-cytidine
  modified_base 56: mod_base = OTHER; note = 2'-O-Methyl-uridine
  modified_base 57: mod_base = OTHER; note = 2'-O-Methyl-adenosine
  modified_base 60: mod_base = OTHER; note = 2'-O-Methyl-cytidine
  modified_base 61: mod_base = OTHER; note = 2'-O-Methyl-cytidine
  modified_base 66: mod_base = OTHER; note = 2'-O-Methyl-uridine
  modified_base 67: mod_base = OTHER; note = 2'-O-Methyl-cytidine
  modified_base 70: mod_base = OTHER; note = 2'-O-Methyl-cytidine
  modified_base 71: mod_base = OTHER; note = 2'-O-Methyl-uridine
  modified_base 72: mod_base = OTHER; note = 2'-O-Methyl-uridine
  modified_base 74: mod_base = OTHER; note = 2'-O-Methyl-adenosine
  modified_base 75: mod_base = OTHER; note = 2'-O-Methyl-adenosine
  modified_base 76: mod_base = OTHER; note = 2'-O-Methyl-adenosine
  modified_base 77: mod_base = OTHER; note = 2'-O-Methyl-adenosine
  modified_base 78: mod_base = OTHER; note = 2'-O-Methyl-adenosine
  modified_base 79: mod_base = OTHER; note = 2'-O-Methyl-guanosine
  modified_base 80: mod_base = OTHER; note = 2'-O-Methyl-uridine
  modified_base 81: mod_base = OTHER; note = 2'-O-Methyl-guanosine
  modified_base 83: mod_base = OTHER; note = 2'-O-Methyl-cytidine
  modified_base 84: mod_base = OTHER; note = 2'-O-Methyl-adenosine
  modified_base 85: mod_base = OTHER; note = 2'-O-Methyl-cytidine
  modified_base 86: mod_base = OTHER; note = 2'-O-Methyl-cytidine
  modified_base 87: mod_base = OTHER; note = 2'-O-Methyl-guanosine
  modified_base 88: mod_base = OTHER; note = 2'-O-Methyl-adenosine
  modified_base 89: mod_base = OTHER; note = 2'-O-Methyl-guanosine
  modified_base 90: mod_base = OTHER; note = 2'-O-Methyl-uridine
  modified_base 91: mod_base = OTHER; note = 2'-O-Methyl-cytidine
  modified_base 92: mod_base = OTHER; note = 2'-O-Methyl-guanosine
  modified_base 93: mod_base = OTHER; note = 2'-O-Methyl-guanosine
  modified_base 94: mod_base = OTHER; note = 2'-O-Methyl-uridine
  modified_base 95: mod_base = OTHER; note = 2'-O-Methyl-guanosine
  modified_base 96: mod_base = OTHER; note = 2'-O-Methyl-cytidine
  modified_base 97: mod_base = OTHER; note = 2'-O-Methyl-uridine
  modified_base 98: mod_base = OTHER; note = 2'-O-Methyl-uridine phosphorothioate
  modified_base 99: mod_base = OTHER; note = 2'-O-Methyl-uridine phosphorothioate
  modified_base 100: mod_base = OTHER; note = 2'-O-Methyl-uridine

SEQ ID NO: 2613 - RNA, 103 nt, synthetic construct; identical to SEQ ID NO: 1699
  source 1..103: mol_type = other RNA
  modified_base 1: mod_base = OTHER; note = 2'-O-Methyl-guanosine phosphorothioate
  modified_base 2: mod_base = OTHER; note = 2'-O-Methyl-adenosine phosphorothioate
  modified_base 3: mod_base = OTHER; note = 2'-O-Methyl-guanosine phosphorothioate
  modified_base 21: mod_base = OTHER; note = 2'-O-Methyl-guanosine
  modified_base 28: mod_base = OTHER; note = 2'-O-Methyl-adenosine
  modified_base 29: mod_base = OTHER; note = 2'-O-Methyl-guanosine
  modified_base 30: mod_base = OTHER; note = 2'-O-Methyl-cytidine
  modified_base 31: mod_base = OTHER; note = 2'-O-Methyl-uridine
  modified_base 32: mod_base = OTHER; note = 2'-O-Methyl-adenosine
  modified_base 33: mod_base = OTHER; note = 2'-O-Methyl-guanosine
  modified_base 34: mod_base = OTHER; note = 2'-O-Methyl-adenosine
  modified_base 35: mod_base = OTHER; note = 2'-O-Methyl-adenosine
  modified_base 36: mod_base = OTHER; note = 2'-O-Methyl-adenosine
  modified_base 37: mod_base = OTHER; note = 2'-O-Methyl-uridine
  modified_base 38: mod_base = OTHER; note = 2'-O-Methyl-adenosine
  modified_base 39: mod_base = OTHER; note = 2'-O-Methyl-guanosine
  modified_base 40: mod_base = OTHER; note = 2'-O-Methyl-cytidine
  modified_base 41: mod_base = OTHER; note = 2'-O-Methyl-adenosine
  modified_base 42: mod_base = OTHER; note = 2'-O-Methyl-adenosine
  modified_base 45: mod_base = OTHER; note = uridine phosphorothioate
  modified_base 46: mod_base = OTHER; note = 2'-O-Methyl-adenosine
  modified_base 48: mod_base = OTHER; note = 2'-O-Methyl-adenosine
  modified_base 50: mod_base = OTHER; note = 2'-O-Methyl-uridine
  modified_base 52: mod_base = OTHER; note = 2'-O-Methyl-adenosine
  modified_base 53: mod_base = OTHER; note = 2'-O-Methyl-guanosine
  modified_base 54: mod_base = OTHER; note = 2'-O-Methyl-guanosine
  modified_base 55: mod_base = OTHER; note = 2'-O-Methyl-cytidine
  modified_base 56: mod_base = OTHER; note = 2'-O-Methyl-uridine
  modified_base 57: mod_base = OTHER; note = 2'-O-Methyl-adenosine
  modified_base 60: mod_base = OTHER; note = 2'-O-Methyl-cytidine
  modified_base 61: mod_base = OTHER; note = 2'-O-Methyl-cytidine
  modified_base 66: mod_base = OTHER; note = 2'-O-Methyl-uridine
  modified_base 67: mod_base = OTHER; note = 2'-O-Methyl-cytidine
  modified_base 70: mod_base = OTHER; note = 2'-O-Methyl-cytidine
  modified_base 71: mod_base = OTHER; note = 2'-O-Methyl-uridine
  modified_base 72: mod_base = OTHER; note = 2'-O-Methyl-uridine
  modified_base 73: mod_base = OTHER; note = 2'-O-Methyl-guanosine
  modified_base 74: mod_base = OTHER; note = 2'-O-Methyl-adenosine
  modified_base 75: mod_base = OTHER; note = 2'-O-Methyl-adenosine
  modified_base 76: mod_base = OTHER; note = 2'-O-Methyl-adenosine
  modified_base 77: mod_base = OTHER; note = 2'-O-Methyl-adenosine
  modified_base 78: mod_base = OTHER; note = 2'-O-Methyl-adenosine
  modified_base 79: mod_base = OTHER; note = 2'-O-Methyl-guanosine
  modified_base 80: mod_base = OTHER; note = 2'-O-Methyl-uridine
  modified_base 81: mod_base = OTHER; note = 2'-O-Methyl-guanosine
  modified_base 83: mod_base = OTHER; note = 2'-O-Methyl-cytidine
  modified_base 84: mod_base = OTHER; note = 2'-O-Methyl-adenosine
  modified_base 85: mod_base = OTHER; note = 2'-O-Methyl-cytidine
  modified_base 86: mod_base = OTHER; note = 2'-O-Methyl-cytidine
  modified_base 87: mod_base = OTHER; note = 2'-O-Methyl-guanosine
  modified_base 88: mod_base = OTHER; note = 2'-O-Methyl-adenosine
  modified_base 89: mod_base = OTHER; note = 2'-O-Methyl-guanosine
  modified_base 90: mod_base = OTHER; note = 2'-O-Methyl-uridine
  modified_base 91: mod_base = OTHER; note = 2'-O-Methyl-cytidine
  modified_base 92: mod_base = OTHER; note = 2'-O-Methyl-guanosine
  modified_base 93: mod_base = OTHER; note = 2'-O-Methyl-guanosine
  modified_base 94: mod_base = OTHER; note = 2'-O-Methyl-uridine
  modified_base 95: mod_base = OTHER; note = 2'-O-Methyl-guanosine
  modified_base 96: mod_base = OTHER; note = 2'-O-Methyl-cytidine
  modified_base 97: mod_base = OTHER; note = 2'-O-Methyl-uridine
  modified_base 98: mod_base = OTHER; note = 2'-O-Methyl-uridine phosphorothioate
  modified_base 99: mod_base = OTHER; note = 2'-O-Methyl-uridine phosphorothioate
  modified_base 100: mod_base = OTHER; note = 2'-O-Methyl-uridine

SEQ ID NO: 2614 - RNA, 103 nt, synthetic construct; identical to SEQ ID NO: 1699
  source 1..103: mol_type = other RNA
  modified_base 1: mod_base = OTHER; note = 2'-O-Methyl-guanosine phosphorothioate
  modified_base 2: mod_base = OTHER; note = 2'-O-Methyl-adenosine phosphorothioate
  modified_base 3: mod_base = OTHER; note = 2'-O-Methyl-guanosine phosphorothioate
  modified_base 21: mod_base = OTHER; note = 2'-O-Methyl-guanosine
  modified_base 28: mod_base = OTHER; note = 2'-O-Methyl-adenosine
  modified_base 29: mod_base = OTHER; note = 2'-O-Methyl-guanosine
  modified_base 30: mod_base = OTHER; note = 2'-O-Methyl-cytidine
  modified_base 31: mod_base = OTHER; note = 2'-O-Methyl-uridine
  modified_base 32: mod_base = OTHER; note = 2'-O-Methyl-adenosine
  modified_base 34: mod_base = OTHER; note = 2'-O-Methyl-adenosine
  modified_base 35: mod_base = OTHER; note = 2'-O-Methyl-adenosine
  modified_base 36: mod_base = OTHER; note = 2'-O-Methyl-adenosine
  modified_base 37: mod_base = OTHER; note = 2'-O-Methyl-uridine
  modified_base 38: mod_base = OTHER; note = 2'-O-Methyl-adenosine
  modified_base 39: mod_base = OTHER; note = 2'-O-Methyl-guanosine
  modified_base 40: mod_base = OTHER; note = 2'-O-Methyl-cytidine
  modified_base 41: mod_base = OTHER; note = 2'-O-Methyl-adenosine
  modified_base 42: mod_base = OTHER; note = 2'-O-Methyl-adenosine
  modified_base 45: mod_base = OTHER; note = uridine phosphorothioate
  modified_base 46: mod_base = OTHER; note = 2'-O-Methyl-adenosine
  modified_base 48: mod_base = OTHER; note = 2'-O-Methyl-adenosine
  modified_base 50: mod_base = OTHER; note = 2'-O-Methyl-uridine
  modified_base 52: mod_base = OTHER; note = 2'-O-Methyl-adenosine
  modified_base 53: mod_base = OTHER; note = 2'-O-Methyl-guanosine
  modified_base 54: mod_base = OTHER; note = 2'-O-Methyl-guanosine
  modified_base 55: mod_base = OTHER; note = 2'-O-Methyl-cytidine
  modified_base 56: mod_base = OTHER; note = 2'-O-Methyl-uridine
  modified_base 57: mod_base = OTHER; note = 2'-O-Methyl-adenosine
  modified_base 60: mod_base = OTHER; note = 2'-O-Methyl-cytidine
  modified_base 61: mod_base = OTHER; note = 2'-O-Methyl-cytidine
  modified_base 66: mod_base = OTHER; note = 2'-O-Methyl-uridine
  modified_base 67: mod_base = OTHER; note = 2'-O-Methyl-cytidine
  modified_base 70: mod_base = OTHER; note = 2'-O-Methyl-cytidine
  modified_base 71: mod_base = OTHER; note = 2'-O-Methyl-uridine
  modified_base 72: mod_base = OTHER; note = 2'-O-Methyl-uridine
  modified_base 74: mod_base = OTHER; note = 2'-O-Methyl-adenosine
  modified_base 75: mod_base = OTHER; note = 2'-O-Methyl-adenosine
  modified_base 76: mod_base = OTHER; note = 2'-O-Methyl-adenosine
  modified_base 77: mod_base = OTHER; note = 2'-O-Methyl-adenosine
  modified_base 78: mod_base = OTHER; note = 2'-O-Methyl-adenosine
  modified_base 79: mod_base = OTHER; note = 2'-O-Methyl-guanosine
  modified_base 80: mod_base = OTHER; note = 2'-O-Methyl-uridine
  modified_base 81: mod_base = OTHER; note = 2'-O-Methyl-guanosine
  modified_base 83: mod_base = OTHER; note = 2'-O-Methyl-cytidine
  modified_base 84: mod_base = OTHER; note = 2'-O-Methyl-adenosine
  modified_base 85: mod_base = OTHER; note = 2'-O-Methyl-cytidine
  modified_base 86: mod_base = OTHER; note = 2'-O-Methyl-cytidine
  modified_base 87: mod_base = OTHER; note = 2'-O-Methyl-guanosine
  modified_base 88: mod_base = OTHER; note = 2'-O-Methyl-adenosine
  modified_base 89: mod_base = OTHER; note = 2'-O-Methyl-guanosine
  modified_base 90: mod_base = OTHER; note = 2'-O-Methyl-uridine
  modified_base 91: mod_base = OTHER; note = 2'-O-Methyl-cytidine
  modified_base 92: mod_base = OTHER; note = 2'-O-Methyl-guanosine
  modified_base 93: mod_base = OTHER; note = 2'-O-Methyl-guanosine
  modified_base 94: mod_base = OTHER; note = 2'-O-Methyl-uridine
  modified_base 95: mod_base = OTHER; note = 2'-O-Methyl-guanosine
  modified_base 96: mod_base = OTHER; note = 2'-O-Methyl-cytidine
  modified_base 97: mod_base = OTHER; note = 2'-O-Methyl-uridine
  modified_base 98: mod_base = OTHER; note = 2'-O-Methyl-uridine phosphorothioate
  modified_base 99: mod_base = OTHER; note = 2'-O-Methyl-uridine phosphorothioate
  modified_base 100: mod_base = OTHER; note = 2'-O-Methyl-uridine

SEQ ID NO: 2615 - RNA, 103 nt, synthetic construct; identical to SEQ ID NO: 1700
  source 1..103: mol_type = other RNA
  modified_base 1: mod_base = OTHER; note = 2'-O-Methyl-cytidine phosphorothioate
  modified_base 2: mod_base = OTHER; note = 2'-O-Methyl-adenosine phosphorothioate
  modified_base 3: mod_base = OTHER; note = 2'-O-Methyl-guanosine phosphorothioate
  modified_base 21: mod_base = OTHER; note = 2'-O-Methyl-guanosine
  modified_base 28: mod_base = OTHER; note = 2'-O-Methyl-adenosine
  modified_base 29: mod_base = OTHER; note = 2'-O-Methyl-guanosine
  modified_base 30: mod_base = OTHER; note = 2'-O-Methyl-cytidine
  modified_base 31: mod_base = OTHER; note = 2'-O-Methyl-uridine
  modified_base 32: mod_base = OTHER; note = 2'-O-Methyl-adenosine
  modified_base 33: mod_base = OTHER; note = 2'-O-Methyl-guanosine
  modified_base 34: mod_base = OTHER; note = 2'-O-Methyl-adenosine
  modified_base 35: mod_base = OTHER; note = 2'-O-Methyl-adenosine
  modified_base 36: mod_base = OTHER; note = 2'-O-Methyl-adenosine
  modified_base 37: mod_base = OTHER; note = 2'-O-Methyl-uridine
  modified_base 38: mod_base = OTHER; note = 2'-O-Methyl-adenosine
  modified_base 39: mod_base = OTHER; note = 2'-O-Methyl-guanosine
  modified_base 40: mod_base = OTHER; note = 2'-O-Methyl-cytidine
  modified_base 41: mod_base = OTHER; note = 2'-O-Methyl-adenosine
  modified_base 42: mod_base = OTHER; note = 2'-O-Methyl-adenosine
  modified_base 45: mod_base = OTHER; note = uridine phosphorothioate
  modified_base 46: mod_base = OTHER; note = 2'-O-Methyl-adenosine
  modified_base 48: mod_base = OTHER; note = 2'-O-Methyl-adenosine
  modified_base 50: mod_base = OTHER; note = 2'-O-Methyl-uridine
  modified_base 52: mod_base = OTHER; note = 2'-O-Methyl-adenosine
  modified_base 53: mod_base = OTHER; note = 2'-O-Methyl-guanosine
  modified_base 54: mod_base = OTHER; note = 2'-O-Methyl-guanosine
  modified_base 57: mod_base = OTHER; note = 2'-O-Methyl-adenosine
  modified_base 61: mod_base = OTHER; note = 2'-O-Methyl-cytidine
  modified_base 66: mod_base = OTHER; note = 2'-O-Methyl-uridine
  modified_base 67: mod_base = OTHER; note = 2'-O-Methyl-cytidine
  modified_base 70: mod_base = OTHER; note = 2'-O-Methyl-cytidine
  modified_base 71: mod_base = OTHER; note = 2'-O-Methyl-uridine
  modified_base 72: mod_base = OTHER; note = 2'-O-Methyl-uridine
  modified_base 74: mod_base = OTHER; note = 2'-O-Methyl-adenosine
  modified_base 75: mod_base = OTHER; note = 2'-O-Methyl-adenosine
  modified_base 76: mod_base = OTHER; note = 2'-O-Methyl-adenosine
  modified_base 77: mod_base = OTHER; note = 2'-O-Methyl-adenosine
  modified_base 78: mod_base = OTHER; note = 2'-O-Methyl-adenosine
  modified_base 79: mod_base = OTHER; note = 2'-O-Methyl-guanosine
  modified_base 80: mod_base = OTHER; note = 2'-O-Methyl-uridine
  modified_base 82: mod_base = OTHER; note = 2'-O-Methyl-guanosine
  modified_base 83: mod_base = OTHER; note = 2'-O-Methyl-cytidine
  modified_base 84: mod_base = OTHER; note = 2'-O-Methyl-adenosine
  modified_base 85: mod_base = OTHER; note = 2'-O-Methyl-cytidine
  modified_base 86: mod_base = OTHER; note = 2'-O-Methyl-cytidine
  modified_base 87: mod_base = OTHER; note = 2'-O-Methyl-guanosine
  modified_base 89: mod_base = OTHER; note = 2'-O-Methyl-guanosine
  modified_base 92: mod_base = OTHER; note = 2'-O-Methyl-guanosine
  modified_base 93: mod_base = OTHER; note = 2'-O-Methyl-guanosine
  modified_base 94: mod_base = OTHER; note = 2'-O-Methyl-uridine
  modified_base 95: mod_base = OTHER; note = 2'-O-Methyl-guanosine
  modified_base 96: mod_base = OTHER; note = 2'-O-Methyl-cytidine
  modified_base 97: mod_base = OTHER; note = 2'-O-Methyl-uridine
  modified_base 98: mod_base = OTHER; note = 2'-O-Methyl-uridine phosphorothioate
  modified_base 99: mod_base = OTHER; note = 2'-O-Methyl-uridine phosphorothioate
  modified_base 100: mod_base = OTHER; note = 2'-O-Methyl-uridine

SEQ ID NO: 2616 - RNA, 103 nt, synthetic construct; identical to SEQ ID NO: 1700
  source 1..103: mol_type = other RNA
  modified_base 1: mod_base = OTHER; note = 2'-O-Methyl-cytidine phosphorothioate
  modified_base 2: mod_base = OTHER; note = 2'-O-Methyl-adenosine phosphorothioate
  modified_base 3: mod_base = OTHER; note = 2'-O-Methyl-guanosine phosphorothioate
  modified_base 21: mod_base = OTHER; note = 2'-O-Methyl-guanosine
  modified_base 28: mod_base = OTHER; note = 2'-O-Methyl-adenosine
  modified_base 29: mod_base = OTHER; note = 2'-O-Methyl-guanosine
  modified_base 30: mod_base = OTHER; note = 2'-O-Methyl-cytidine
  modified_base 31: mod_base = OTHER; note = 2'-O-Methyl-uridine
  modified_base 32: mod_base = OTHER; note = 2'-O-Methyl-adenosine
  modified_base 33: mod_base = OTHER; note = 2'-O-Methyl-guanosine
  modified_base 34: mod_base = OTHER; note = 2'-O-Methyl-adenosine
  modified_base 35: mod_base = OTHER; note = 2'-O-Methyl-adenosine
  modified_base 36: mod_base = OTHER; note = 2'-O-Methyl-adenosine
  modified_base 37: mod_base = OTHER; note = 2'-O-Methyl-uridine
  modified_base 38: mod_base = OTHER; note = 2'-O-Methyl-adenosine
  modified_base 39: mod_base = OTHER; note = 2'-O-Methyl-guanosine
  modified_base 40: mod_base = OTHER; note = 2'-O-Methyl-cytidine
  modified_base 41: mod_base = OTHER; note = 2'-O-Methyl-adenosine
  modified_base 42: mod_base = OTHER; note = 2'-O-Methyl-adenosine
  modified_base 45: mod_base = OTHER; note = uridine phosphorothioate
  modified_base 46: mod_base = OTHER; note = 2'-O-Methyl-adenosine
  modified_base 48: mod_base = OTHER; note = 2'-O-Methyl-adenosine
  modified_base 50: mod_base = OTHER; note = 2'-O-Methyl-uridine
  modified_base 52: mod_base = OTHER; note = 2'-O-Methyl-adenosine
  modified_base 53: mod_base = OTHER; note = 2'-O-Methyl-guanosine
  modified_base 54: mod_base = OTHER; note = 2'-O-Methyl-guanosine
  modified_base 55: mod_base = OTHER; note = 2'-O-Methyl-cytidine
  modified_base 56: mod_base = OTHER; note = 2'-O-Methyl-uridine
  modified_base 57: mod_base = OTHER; note = 2'-O-Methyl-adenosine
  modified_base 60: mod_base = OTHER; note = 2'-O-Methyl-cytidine
  modified_base 61: mod_base = OTHER; note = 2'-O-Methyl-cytidine
  modified_base 66: mod_base = OTHER; note = 2'-O-Methyl-uridine
  modified_base 67: mod_base = OTHER; note = 2'-O-Methyl-cytidine
  modified_base 70: mod_base = OTHER; note = 2'-O-Methyl-cytidine
  modified_base 71: mod_base = OTHER; note = 2'-O-Methyl-uridine
  modified_base 72: mod_base = OTHER; note = 2'-O-Methyl-uridine
  modified_base 74: mod_base = OTHER; note = 2'-O-Methyl-adenosine
  modified_base 75: mod_base = OTHER; note = 2'-O-Methyl-adenosine
  modified_base 76: mod_base = OTHER; note = 2'-O-Methyl-adenosine
  modified_base 77: mod_base = OTHER; note = 2'-O-Methyl-adenosine
  modified_base 78: mod_base = OTHER; note = 2'-O-Methyl-adenosine
  modified_base 79: mod_base = OTHER; note = 2'-O-Methyl-guanosine
  modified_base 80: mod_base = OTHER; note = 2'-O-Methyl-uridine
  modified_base 82: mod_base = OTHER; note = 2'-O-Methyl-guanosine
  modified_base 83: mod_base = OTHER; note = 2'-O-Methyl-cytidine
  modified_base 84: mod_base = OTHER; note = 2'-O-Methyl-adenosine
  modified_base 85: mod_base = OTHER; note = 2'-O-Methyl-cytidine
  modified_base 86: mod_base = OTHER; note = 2'-O-Methyl-cytidine
  modified_base 87: mod_base = OTHER; note = 2'-O-Methyl-guanosine
  modified_base 89: mod_base = OTHER; note = 2'-O-Methyl-guanosine
  modified_base 92: mod_base = OTHER; note = 2'-O-Methyl-guanosine
  modified_base 93: mod_base = OTHER; note = 2'-O-Methyl-guanosine
  modified_base 94: mod_base = OTHER; note = 2'-O-Methyl-uridine
  modified_base 95: mod_base = OTHER; note = 2'-O-Methyl-guanosine
  modified_base 96: mod_base = OTHER; note = 2'-O-Methyl-cytidine
  modified_base 97: mod_base = OTHER; note = 2'-O-Methyl-uridine
  modified_base 98: mod_base = OTHER; note = 2'-O-Methyl-uridine phosphorothioate
  modified_base 99: mod_base = OTHER; note = 2'-O-Methyl-uridine phosphorothioate
  modified_base 100: mod_base = OTHER; note = 2'-O-Methyl-uridine

SEQ ID NO: 2617 - RNA, 103 nt, synthetic construct; identical to SEQ ID NO: 1700
  source 1..103: mol_type = other RNA
  modified_base 1: mod_base = OTHER; note = 2'-O-Methyl-cytidine phosphorothioate
  modified_base 2: mod_base = OTHER; note = 2'-O-Methyl-adenosine phosphorothioate
  modified_base 3: mod_base = OTHER; note = 2'-O-Methyl-guanosine phosphorothioate
  modified_base 21: mod_base = OTHER; note = 2'-O-Methyl-guanosine
  modified_base 28: mod_base = OTHER; note = 2'-O-Methyl-adenosine
  modified_base 29: mod_base = OTHER; note = 2'-O-Methyl-guanosine
  modified_base 30: mod_base = OTHER; note = 2'-O-Methyl-cytidine
  modified_base 31: mod_base = OTHER; note = 2'-O-Methyl-uridine
  modified_base 32: mod_base = OTHER; note = 2'-O-Methyl-adenosine
  modified_base 33: mod_base = OTHER; note = 2'-O-Methyl-guanosine
  modified_base 34: mod_base = OTHER; note = 2'-O-Methyl-adenosine
  modified_base 35: mod_base = OTHER; note = 2'-O-Methyl-adenosine
  modified_base 36: mod_base = OTHER; note = 2'-O-Methyl-adenosine
  modified_base 37: mod_base = OTHER; note = 2'-O-Methyl-uridine
  modified_base 38: mod_base = OTHER; note = 2'-O-Methyl-adenosine
  modified_base 39: mod_base = OTHER; note = 2'-O-Methyl-guanosine
  modified_base 40: mod_base = OTHER; note = 2'-O-Methyl-cytidine
  modified_base 41: mod_base = OTHER; note = 2'-O-Methyl-adenosine
  modified_base 42: mod_base = OTHER; note = 2'-O-Methyl-adenosine
  modified_base 45: mod_base = OTHER; note = uridine phosphorothioate
  modified_base 46: mod_base = OTHER; note = 2'-O-Methyl-adenosine
  modified_base 48: mod_base = OTHER; note = 2'-O-Methyl-adenosine
  modified_base 50: mod_base = OTHER; note = 2'-O-Methyl-uridine
  modified_base 52: mod_base = OTHER; note = 2'-O-Methyl-adenosine
  modified_base 53: mod_base = OTHER; note = 2'-O-Methyl-guanosine
  modified_base 54: mod_base = OTHER; note = 2'-O-Methyl-guanosine
  modified_base 57: mod_base = OTHER; note = 2'-O-Methyl-adenosine
  modified_base 61: mod_base = OTHER; note = 2'-O-Methyl-cytidine
  modified_base 66: mod_base = OTHER; note = 2'-O-Methyl-uridine
  modified_base 67: mod_base = OTHER; note = 2'-O-Methyl-cytidine
  modified_base 70: mod_base = OTHER; note = 2'-O-Methyl-cytidine
  modified_base 71: mod_base = OTHER; note = 2'-O-Methyl-uridine
  modified_base 72: mod_base = OTHER; note = 2'-O-Methyl-uridine
  modified_base 73: mod_base = OTHER; note = 2'-O-Methyl-guanosine
  modified_base 74: mod_base = OTHER; note = 2'-O-Methyl-adenosine
  modified_base 75: mod_base = OTHER; note = 2'-O-Methyl-adenosine
  modified_base 76: mod_base = OTHER; note = 2'-O-Methyl-adenosine
  modified_base 77: mod_base = OTHER; note = 2'-O-Methyl-adenosine
  modified_base 78: mod_base = OTHER; note = 2'-O-Methyl-adenosine
  modified_base 79: mod_base = OTHER; note = 2'-O-Methyl-guanosine
  modified_base 80: mod_base = OTHER; note = 2'-O-Methyl-uridine
  modified_base 82: mod_base = OTHER; note = 2'-O-Methyl-guanosine
  modified_base 83: mod_base = OTHER; note = 2'-O-Methyl-cytidine
  modified_base 84: mod_base = OTHER; note = 2'-O-Methyl-adenosine
  modified_base 85: mod_base = OTHER; note = 2'-O-Methyl-cytidine
  modified_base 86: mod_base = OTHER; note = 2'-O-Methyl-cytidine
  modified_base 87: mod_base = OTHER; note = 2'-O-Methyl-guanosine
  modified_base 89: mod_base = OTHER; note = 2'-O-Methyl-guanosine
  modified_base 91: mod_base = OTHER; note = 2'-O-Methyl-cytidine
  modified_base 92: mod_base = OTHER; note = 2'-O-Methyl-guanosine
  modified_base 93: mod_base = OTHER; note = 2'-O-Methyl-guanosine
  modified_base 94: mod_base = OTHER; note = 2'-O-Methyl-uridine
  modified_base 95: mod_base = OTHER; note = 2'-O-Methyl-guanosine
  modified_base 96: mod_base = OTHER; note = 2'-O-Methyl-cytidine
  modified_base 97: mod_base = OTHER; note = 2'-O-Methyl-uridine
  modified_base 98: mod_base = OTHER; note = 2'-O-Methyl-uridine phosphorothioate
  modified_base 99: mod_base = OTHER; note = 2'-O-Methyl-uridine phosphorothioate
  modified_base 100: mod_base = OTHER; note = 2'-O-Methyl-uridine

SEQ ID NO: 2618 - RNA, 103 nt, synthetic construct; identical to SEQ ID NO: 1700
  source 1..103: mol_type = other RNA
  modified_base 1: mod_base = OTHER; note = 2'-O-Methyl-cytidine phosphorothioate
  modified_base 2: mod_base = OTHER; note = 2'-O-Methyl-adenosine phosphorothioate
  modified_base 3: mod_base = OTHER; note = 2'-O-Methyl-guanosine phosphorothioate
  modified_base 21: mod_base = OTHER; note = 2'-O-Methyl-guanosine
  modified_base 28: mod_base = OTHER; note = 2'-O-Methyl-adenosine
  modified_base 29: mod_base = OTHER; note = 2'-O-Methyl-guanosine
  modified_base 30: mod_base = OTHER; note = 2'-O-Methyl-cytidine
  modified_base 31: mod_base = OTHER; note = 2'-O-Methyl-uridine
  modified_base 32: mod_base = OTHER; note = 2'-O-Methyl-adenosine
  modified_base 34: mod_base = OTHER; note = 2'-O-Methyl-adenosine
  modified_base 35: mod_base = OTHER; note = 2'-O-Methyl-adenosine
  modified_base 36: mod_base = OTHER; note = 2'-O-Methyl-adenosine
  modified_base 37: mod_base = OTHER; note = 2'-O-Methyl-uridine
  modified_base 38: mod_base = OTHER; note = 2'-O-Methyl-adenosine
  modified_base 39: mod_base = OTHER; note = 2'-O-Methyl-guanosine
  modified_base 40: mod_base = OTHER; note = 2'-O-Methyl-cytidine
  modified_base 41: mod_base = OTHER; note = 2'-O-Methyl-adenosine
  modified_base 42: mod_base = OTHER; note = 2'-O-Methyl-adenosine
  modified_base 45: mod_base = OTHER; note = uridine phosphorothioate
  modified_base 46: mod_base = OTHER; note = 2'-O-Methyl-adenosine
  modified_base 48: mod_base = OTHER; note = 2'-O-Methyl-adenosine
  modified_base 50: mod_base = OTHER; note = 2'-O-Methyl-uridine
  modified_base 52: mod_base = OTHER; note = 2'-O-Methyl-adenosine
  modified_base 53: mod_base = OTHER; note = 2'-O-Methyl-guanosine
  modified_base 54: mod_base = OTHER; note = 2'-O-Methyl-guanosine
  modified_base 57: mod_base = OTHER; note = 2'-O-Methyl-adenosine
  modified_base 61: mod_base = OTHER; note = 2'-O-Methyl-cytidine
  modified_base 66: mod_base = OTHER; note = 2'-O-Methyl-uridine
  modified_base 67: mod_base = OTHER; note = 2'-O-Methyl-cytidine
  modified_base 70: mod_base = OTHER; note = 2'-O-Methyl-cytidine
  modified_base 71: mod_base = OTHER; note = 2'-O-Methyl-uridine
  modified_base 72: mod_base = OTHER; note = 2'-O-Methyl-uridine
  modified_base 73: mod_base = OTHER; note = 2'-O-Methyl-guanosine
  modified_base 74: mod_base = OTHER; note = 2'-O-Methyl-adenosine
  modified_base 75: mod_base = OTHER; note = 2'-O-Methyl-adenosine
  modified_base 76: mod_base = OTHER; note = 2'-O-Methyl-adenosine
  modified_base 77: mod_base = OTHER; note = 2'-O-Methyl-adenosine
  modified_base 78: mod_base = OTHER; note = 2'-O-Methyl-adenosine
  modified_base 79: mod_base = OTHER; note = 2'-O-Methyl-guanosine
  modified_base 80: mod_base = OTHER; note = 2'-O-Methyl-uridine
  modified_base 82: mod_base = OTHER; note = 2'-O-Methyl-guanosine
  modified_base 83: mod_base = OTHER; note = 2'-O-Methyl-cytidine
  modified_base 84: mod_base = OTHER; note = 2'-O-Methyl-adenosine
  modified_base 85: mod_base = OTHER; note = 2'-O-Methyl-cytidine
  modified_base 86: mod_base = OTHER; note = 2'-O-Methyl-cytidine
  modified_base 87: mod_base = OTHER; note = 2'-O-Methyl-guanosine
  modified_base 89: mod_base = OTHER; note = 2'-O-Methyl-guanosine
  modified_base 92: mod_base = OTHER; note = 2'-O-Methyl-guanosine
  modified_base 93: mod_base = OTHER; note = 2'-O-Methyl-guanosine
  modified_base 94: mod_base = OTHER; note = 2'-O-Methyl-uridine
  modified_base 95: mod_base = OTHER; note = 2'-O-Methyl-guanosine
  modified_base 96: mod_base = OTHER; note = 2'-O-Methyl-cytidine
  modified_base 97: mod_base = OTHER; note = 2'-O-Methyl-uridine
  modified_base 98: mod_base = OTHER; note = 2'-O-Methyl-uridine phosphorothioate
  modified_base 99: mod_base = OTHER; note = 2'-O-Methyl-uridine phosphorothioate
  modified_base 100: mod_base = OTHER; note = 2'-O-Methyl-uridine

SEQ ID NO: 2619 - RNA, 103 nt, synthetic construct; identical to SEQ ID NO: 1700
  source 1..103: mol_type = other RNA
  modified_base 1: mod_base = OTHER; note = 2'-O-Methyl-cytidine phosphorothioate
  modified_base 2: mod_base = OTHER; note = 2'-O-Methyl-adenosine phosphorothioate
  modified_base 3: mod_base = OTHER; note = 2'-O-Methyl-guanosine phosphorothioate
  modified_base 21: mod_base = OTHER; note = 2'-O-Methyl-guanosine
  modified_base 28: mod_base = OTHER; note = 2'-O-Methyl-adenosine
  modified_base 29: mod_base = OTHER; note = 2'-O-Methyl-guanosine
  modified_base 30: mod_base = OTHER; note = 2'-O-Methyl-cytidine
  modified_base 31: mod_base = OTHER; note = 2'-O-Methyl-uridine
  modified_base 32: mod_base = OTHER; note = 2'-O-Methyl-adenosine
  modified_base 34: mod_base = OTHER; note = 2'-O-Methyl-adenosine
  modified_base 35: mod_base = OTHER; note = 2'-O-Methyl-adenosine
  modified_base 36: mod_base = OTHER; note = 2'-O-Methyl-adenosine
  modified_base 37: mod_base = OTHER; note = 2'-O-Methyl-uridine
  modified_base 38: mod_base = OTHER; note = 2'-O-Methyl-adenosine
  modified_base 39: mod_base = OTHER; note = 2'-O-Methyl-guanosine
  modified_base 40: mod_base = OTHER; note = 2'-O-Methyl-cytidine
  modified_base 41: mod_base = OTHER; note = 2'-O-Methyl-adenosine
  modified_base 42: mod_base = OTHER; note = 2'-O-Methyl-adenosine
  modified_base 45: mod_base = OTHER; note = uridine phosphorothioate
  modified_base 46: mod_base = OTHER; note = 2'-O-Methyl-adenosine
  modified_base 48: mod_base = OTHER; note = 2'-O-Methyl-adenosine
  modified_base 50: mod_base = OTHER; note = 2'-O-Methyl-uridine
  modified_base 52: mod_base = OTHER; note = 2'-O-Methyl-adenosine
  modified_base 53: mod_base = OTHER; note = 2'-O-Methyl-guanosine
  modified_base 54: mod_base = OTHER; note = 2'-O-Methyl-guanosine
  modified_base 57: mod_base = OTHER; note = 2'-O-Methyl-adenosine
  modified_base 61: mod_base = OTHER; note = 2'-O-Methyl-cytidine
  modified_base 66: mod_base = OTHER; note = 2'-O-Methyl-uridine
  modified_base 67: mod_base = OTHER; note = 2'-O-Methyl-cytidine
  modified_base 70: mod_base = OTHER; note = 2'-O-Methyl-cytidine
  modified_base 71: mod_base = OTHER; note = 2'-O-Methyl-uridine
  modified_base 72: mod_base = OTHER; note = 2'-O-Methyl-uridine
  modified_base 73: mod_base = OTHER; note = 2'-O-Methyl-guanosine
  modified_base 74: mod_base = OTHER; note = 2'-O-Methyl-adenosine
  modified_base 75: mod_base = OTHER; note = 2'-O-Methyl-adenosine
  modified_base 76: mod_base = OTHER; note = 2'-O-Methyl-adenosine
  modified_base 77: mod_base = OTHER; note = 2'-O-Methyl-adenosine
  modified_base 78: mod_base = OTHER; note = 2'-O-Methyl-adenosine
  modified_base 79: mod_base = OTHER; note = 2'-O-Methyl-guanosine
  modified_base 80: mod_base = OTHER; note = 2'-O-Methyl-uridine
  modified_base 82: mod_base = OTHER; note = 2'-O-Methyl-guanosine
  modified_base 83: mod_base = OTHER; note = 2'-O-Methyl-cytidine
  modified_base 84: mod_base = OTHER; note = 2'-O-Methyl-adenosine
  modified_base 85: mod_base = OTHER; note = 2'-O-Methyl-cytidine
  modified_base 86: mod_base = OTHER; note = 2'-O-Methyl-cytidine
  modified_base 87: mod_base = OTHER; note = 2'-O-Methyl-guanosine
  modified_base 89: mod_base = OTHER; note = 2'-O-Methyl-guanosine
  modified_base 91: mod_base = OTHER; note = 2'-O-Methyl-cytidine
  modified_base 92: mod_base = OTHER; note = 2'-O-Methyl-guanosine
  modified_base 93: mod_base = OTHER; note = 2'-O-Methyl-guanosine
  modified_base 94: mod_base = OTHER; note = 2'-O-Methyl-uridine
  modified_base 95: mod_base = OTHER; note = 2'-O-Methyl-guanosine
  modified_base 96: mod_base = OTHER; note = 2'-O-Methyl-cytidine
  modified_base 97: mod_base = OTHER; note = 2'-O-Methyl-uridine
  modified_base 98: mod_base = OTHER; note = 2'-O-Methyl-uridine phosphorothioate
  modified_base 99: mod_base = OTHER; note = 2'-O-Methyl-uridine phosphorothioate
  modified_base 100: mod_base = OTHER; note = 2'-O-Methyl-uridine

SEQ ID NO: 2620 - RNA, 103 nt, synthetic construct; identical to SEQ ID NO: 1700
  source 1..103: mol_type = other RNA
  modified_base 1: mod_base = OTHER; note = 2'-O-Methyl-cytidine phosphorothioate
  modified_base 2: mod_base = OTHER; note = 2'-O-Methyl-adenosine phosphorothioate
  modified_base 3: mod_base = OTHER; note = 2'-O-Methyl-guanosine phosphorothioate
  modified_base 21: mod_base = OTHER; note = 2'-O-Methyl-guanosine
  modified_base 28: mod_base = OTHER; note = 2'-O-Methyl-adenosine
  modified_base 29: mod_base = OTHER; note = 2'-O-Methyl-guanosine
  modified_base 30: mod_base = OTHER; note = 2'-O-Methyl-cytidine
  modified_base 31: mod_base = OTHER; note = 2'-O-Methyl-uridine
  modified_base 32: mod_base = OTHER; note = 2'-O-Methyl-adenosine
  modified_base 34: mod_base = OTHER; note = 2'-O-Methyl-adenosine
  modified_base 35: mod_base = OTHER; note = 2'-O-Methyl-adenosine
  modified_base 36: mod_base = OTHER; note = 2'-O-Methyl-adenosine
  modified_base 37: mod_base = OTHER; note = 2'-O-Methyl-uridine
  modified_base 38: mod_base = OTHER; note = 2'-O-Methyl-adenosine
  modified_base 39: mod_base = OTHER; note = 2'-O-Methyl-guanosine
  modified_base 40: mod_base = OTHER; note = 2'-O-Methyl-cytidine
  modified_base 41: mod_base = OTHER; note = 2'-O-Methyl-adenosine
  modified_base 42: mod_base = OTHER; note = 2'-O-Methyl-adenosine
  modified_base 45: mod_base = OTHER; note = uridine phosphorothioate
  modified_base 46: mod_base = OTHER; note = 2'-O-Methyl-adenosine
  modified_base 48: mod_base = OTHER; note = 2'-O-Methyl-adenosine
  modified_base 50: mod_base = OTHER; note = 2'-O-Methyl-uridine
  modified_base 52: mod_base = OTHER; note = 2'-O-Methyl-adenosine
  modified_base 53: mod_base = OTHER; note = 2'-O-Methyl-guanosine
  modified_base 54: mod_base = OTHER; note = 2'-O-Methyl-guanosine
  modified_base 55: mod_base = OTHER; note = 2'-O-Methyl-cytidine
  modified_base 56: mod_base = OTHER; note = 2'-O-Methyl-uridine
  modified_base 57: mod_base = OTHER; note = 2'-O-Methyl-adenosine
  modified_base 60: mod_base = OTHER; note = 2'-O-Methyl-cytidine
  modified_base 61: mod_base = OTHER; note = 2'-O-Methyl-cytidine
  modified_base 66: mod_base = OTHER; note = 2'-O-Methyl-uridine
  modified_base 67: mod_base = OTHER; note = 2'-O-Methyl-cytidine
  modified_base 70: mod_base = OTHER; note = 2'-O-Methyl-cytidine
  modified_base 71: mod_base = OTHER; note = 2'-O-Methyl-uridine
  modified_base 72: mod_base = OTHER; note = 2'-O-Methyl-uridine
  modified_base 74: mod_base = OTHER; note = 2'-O-Methyl-adenosine
  modified_base 75: mod_base = OTHER; note = 2'-O-Methyl-adenosine
  modified_base 76: mod_base = OTHER; note = 2'-O-Methyl-adenosine
  modified_base 77: mod_base = OTHER; note = 2'-O-Methyl-adenosine
  modified_base 78: mod_base = OTHER; note = 2'-O-Methyl-adenosine
  modified_base 79: mod_base = OTHER; note = 2'-O-Methyl-guanosine
  modified_base 80: mod_base = OTHER; note = 2'-O-Methyl-uridine
  modified_base 82: mod_base = OTHER; note = 2'-O-Methyl-guanosine
  modified_base 83: mod_base = OTHER; note = 2'-O-Methyl-cytidine
  modified_base 84: mod_base = OTHER; note = 2'-O-Methyl-adenosine
  modified_base 85: mod_base = OTHER; note = 2'-O-Methyl-cytidine
  modified_base 86: mod_base = OTHER; note = 2'-O-Methyl-cytidine
  modified_base 87: mod_base = OTHER; note = 2'-O-Methyl-guanosine
  modified_base 89: mod_base = OTHER; note = 2'-O-Methyl-guanosine
  modified_base 92: mod_base = OTHER; note = 2'-O-Methyl-guanosine
  modified_base 93: mod_base = OTHER; note = 2'-O-Methyl-guanosine
  modified_base 94: mod_base = OTHER; note = 2'-O-Methyl-uridine
  modified_base 95: mod_base = OTHER; note = 2'-O-Methyl-guanosine
  modified_base 96: mod_base = OTHER; note = 2'-O-Methyl-cytidine
  modified_base 97: mod_base = OTHER; note = 2'-O-Methyl-uridine
  modified_base 98: mod_base = OTHER; note = 2'-O-Methyl-uridine phosphorothioate
  modified_base 99: mod_base = OTHER; note = 2'-O-Methyl-uridine phosphorothioate
  modified_base 100: mod_base = OTHER; note = 2'-O-Methyl-uridine

SEQ ID NO: 2621 - RNA, 103 nt, synthetic construct; identical to SEQ ID NO: 1643
  source 1..103: mol_type = other RNA
  modified_base 1: mod_base = OTHER; note = 2'-O-Methyl-cytidine phosphorothioate
  modified_base 2: mod_base = OTHER; note = 2'-O-Methyl-cytidine phosphorothioate
  modified_base 3: mod_base = OTHER; note = 2'-O-Methyl-cytidine phosphorothioate
  modified_base 21: mod_base = OTHER; note = 2'-O-Methyl-guanosine
  modified_base 25: mod_base = OTHER; note = uridine phosphorothioate
  modified_base 28: mod_base = OTHER; note = 2'-O-Methyl-adenosine
  modified_base 29: mod_base = OTHER; note = 2'-O-Methyl-guanosine
  modified_base 30: mod_base = OTHER; note = 2'-O-Methyl-cytidine
  modified_base 31: mod_base = OTHER; note = 2'-O-Methyl-uridine
  modified_base 32: mod_base = OTHER; note = 2'-O-Methyl-adenosine
  modified_base 33: mod_base = OTHER; note = 2'-O-Methyl-guanosine
  modified_base 34: mod_base = OTHER; note = 2'-O-Methyl-adenosine
  modified_base 35: mod_base = OTHER; note = 2'-O-Methyl-adenosine
  modified_base 36: mod_base = OTHER; note = 2'-O-Methyl-adenosine
  modified_base 37: mod_base = OTHER; note = 2'-O-Methyl-uridine
  modified_base 38: mod_base = OTHER; note = 2'-O-Methyl-adenosine
  modified_base 39: mod_base = OTHER; note = 2'-O-Methyl-guanosine
  modified_base 40: mod_base = OTHER; note = 2'-O-Methyl-cytidine
  modified_base 41: mod_base = OTHER; note = 2'-O-Methyl-adenosine
  modified_base 42: mod_base = OTHER; note = 2'-O-Methyl-adenosine
  modified_base 46: mod_base = OTHER; note = 2'-O-Methyl-adenosine
  modified_base 48: mod_base = OTHER; note = 2'-O-Methyl-adenosine
  modified_base 50: mod_base = OTHER; note = 2'-O-Methyl-uridine
  modified_base 52: mod_base = OTHER; note = 2'-O-Methyl-adenosine
  modified_base 53: mod_base = OTHER; note = 2'-O-Methyl-guanosine
  modified_base 54: mod_base = OTHER; note = 2'-O-Methyl-guanosine
  modified_base 55: mod_base = OTHER; note = 2'-O-Methyl-cytidine
  modified_base 56: mod_base = OTHER; note = 2'-O-Methyl-uridine
  modified_base 57: mod_base = OTHER; note = 2'-O-Methyl-adenosine
  modified_base 60: mod_base = OTHER; note = 2'-O-Methyl-cytidine
  modified_base 61: mod_base = OTHER; note = 2'-O-Methyl-cytidine
  modified_base 66: mod_base = OTHER; note = 2'-O-Methyl-uridine
  modified_base 67: mod_base = OTHER; note = 2'-O-Methyl-cytidine
  modified_base 70: mod_base = OTHER; note = 2'-O-Methyl-cytidine
  modified_base 71: mod_base = OTHER; note = 2'-O-Methyl-uridine
  modified_base 72: mod_base = OTHER; note = 2'-O-Methyl-uridine
  modified_base 73: mod_base = OTHER; note = 2'-O-Methyl-guanosine
  modified_base 74: mod_base = OTHER; note = 2'-O-Methyl-adenosine
  modified_base 75: mod_base = OTHER; note = 2'-O-Methyl-adenosine
  modified_base 76: mod_base = OTHER; note = 2'-O-Methyl-adenosine
  modified_base 77: mod_base = OTHER; note = 2'-O-Methyl-adenosine
  modified_base 78: mod_base = OTHER; note = 2'-O-Methyl-adenosine
  modified_base 79: mod_base = OTHER; note = 2'-O-Methyl-guanosine
  modified_base 80: mod_base = OTHER; note = 2'-O-Methyl-uridine
  modified_base 81: mod_base = OTHER; note = 2'-O-Methyl-guanosine
  modified_base 83: mod_base = OTHER; note = 2'-O-Methyl-cytidine
  modified_base 84: mod_base = OTHER; note = 2'-O-Methyl-adenosine
  modified_base 85: mod_base = OTHER; note = 2'-O-Methyl-cytidine
  modified_base 86: mod_base = OTHER; note = 2'-O-Methyl-cytidine
  modified_base 87: mod_base = OTHER; note = 2'-O-Methyl-guanosine
  modified_base 88: mod_base = OTHER; note = 2'-O-Methyl-adenosine
  modified_base 89: mod_base = OTHER; note = 2'-O-Methyl-guanosine
  modified_base 90: mod_base = OTHER; note = 2'-O-Methyl-uridine
  modified_base 91: mod_base = OTHER; note = 2'-O-Methyl-cytidine
  modified_base 92: mod_base = OTHER; note = 2'-O-Methyl-guanosine
  modified_base 93: mod_base = OTHER; note = 2'-O-Methyl-guanosine
  modified_base 94: mod_base = OTHER; note = 2'-O-Methyl-uridine
  modified_base 95: mod_base = OTHER; note = 2'-O-Methyl-guanosine
  modified_base 96: mod_base = OTHER; note = 2'-O-Methyl-cytidine
  modified_base 97: mod_base = OTHER; note = 2'-O-Methyl-uridine
  modified_base 98: mod_base = OTHER; note = 2'-O-Methyl-uridine phosphorothioate
  modified_base 99: mod_base = OTHER; note = 2'-O-Methyl-uridine phosphorothioate
  modified_base 100: mod_base = OTHER; note = 2'-O-Methyl-uridine

SEQ ID NO: 2622 - RNA, 103 nt, synthetic construct; identical to SEQ ID NO: 1643
  source 1..103: mol_type = other RNA
  modified_base 1: mod_base = OTHER; note = 2'-O-Methyl-cytidine phosphorothioate
  modified_base 2: mod_base = OTHER; note = 2'-O-Methyl-cytidine phosphorothioate
  modified_base 3: mod_base = OTHER; note = 2'-O-Methyl-cytidine phosphorothioate
  modified_base 21: mod_base = OTHER; note = 2'-O-Methyl-guanosine
  modified_base 25: mod_base = OTHER; note = uridine phosphorothioate
  modified_base 28: mod_base = OTHER; note = 2'-O-Methyl-adenosine
  modified_base 29: mod_base = OTHER; note = 2'-O-Methyl-guanosine
  modified_base 30: mod_base = OTHER; note = 2'-O-Methyl-cytidine
  modified_base 31: mod_base = OTHER; note = 2'-O-Methyl-uridine
  modified_base 32: mod_base = OTHER; note = 2'-O-Methyl-adenosine
  modified_base 34: mod_base = OTHER; note = 2'-O-Methyl-adenosine
  modified_base 35: mod_base = OTHER; note = 2'-O-Methyl-adenosine
  modified_base 36: mod_base = OTHER; note = 2'-O-Methyl-adenosine
  modified_base 37: mod_base = OTHER; note = 2'-O-Methyl-uridine
  modified_base 38: mod_base = OTHER; note = 2'-O-Methyl-adenosine
  modified_base 39: mod_base = OTHER; note = 2'-O-Methyl-guanosine
  modified_base 40: mod_base = OTHER; note = 2'-O-Methyl-cytidine
  modified_base 41: mod_base = OTHER; note = 2'-O-Methyl-adenosine
  modified_base 42: mod_base = OTHER; note = 2'-O-Methyl-adenosine
  modified_base 46: mod_base = OTHER; note = 2'-O-Methyl-adenosine
  modified_base 48: mod_base = OTHER; note = 2'-O-Methyl-adenosine
  modified_base 50: mod_base = OTHER; note = 2'-O-Methyl-uridine
  modified_base 52: mod_base = OTHER; note = 2'-O-Methyl-adenosine
  modified_base 53: mod_base = OTHER; note = 2'-O-Methyl-guanosine
  modified_base 54: mod_base = OTHER; note = 2'-O-Methyl-guanosine
  modified_base 55: mod_base = OTHER; note = 2'-O-Methyl-cytidine
  modified_base 56: mod_base = OTHER; note = 2'-O-Methyl-uridine
  modified_base 57: mod_base = OTHER; note = 2'-O-Methyl-adenosine
  modified_base 60: mod_base = OTHER; note = 2'-O-Methyl-cytidine
  modified_base 61: mod_base = OTHER; note = 2'-O-Methyl-cytidine
  modified_base 66: mod_base = OTHER; note = 2'-O-Methyl-uridine
  modified_base 67: mod_base = OTHER; note = 2'-O-Methyl-cytidine
  modified_base 70: mod_base = OTHER; note = 2'-O-Methyl-cytidine
  modified_base 71: mod_base = OTHER; note = 2'-O-Methyl-uridine
  modified_base 72: mod_base = OTHER; note = 2'-O-Methyl-uridine
  modified_base 74: mod_base = OTHER; note = 2'-O-Methyl-adenosine
  modified_base 75: mod_base = OTHER; note = 2'-O-Methyl-adenosine
  modified_base 76: mod_base = OTHER; note = 2'-O-Methyl-adenosine
  modified_base 77: mod_base = OTHER; note = 2'-O-Methyl-adenosine
  modified_base 78: mod_base = OTHER; note = 2'-O-Methyl-adenosine
  modified_base 79: mod_base = OTHER; note = 2'-O-Methyl-guanosine
  modified_base 80: mod_base = OTHER; note = 2'-O-Methyl-uridine
  modified_base 81: mod_base = OTHER; note = 2'-O-Methyl-guanosine
  modified_base 83: mod_base = OTHER; note = 2'-O-Methyl-cytidine
  modified_base 84: mod_base = OTHER; note = 2'-O-Methyl-adenosine
  modified_base 85: mod_base = OTHER; note = 2'-O-Methyl-cytidine
  modified_base 86: mod_base = OTHER; note = 2'-O-Methyl-cytidine
  modified_base 87: mod_base = OTHER; note = 2'-O-Methyl-guanosine
  modified_base 88: mod_base = OTHER; note = 2'-O-Methyl-adenosine
  modified_base 89: mod_base = OTHER; note = 2'-O-Methyl-guanosine
  modified_base 90: mod_base = OTHER; note = 2'-O-Methyl-uridine
  modified_base 91: mod_base = OTHER; note = 2'-O-Methyl-cytidine
  modified_base 92: mod_base = OTHER; note = 2'-O-Methyl-guanosine
  modified_base 93: mod_base = OTHER; note = 2'-O-Methyl-guanosine
  modified_base 94: mod_base = OTHER; note = 2'-O-Methyl-uridine
  modified_base 95: mod_base = OTHER; note = 2'-O-Methyl-guanosine
  modified_base 96: mod_base = OTHER; note = 2'-O-Methyl-cytidine
  modified_base 97: mod_base = OTHER; note = 2'-O-Methyl-uridine
  modified_base 98: mod_base = OTHER; note = 2'-O-Methyl-uridine phosphorothioate
  modified_base 99: mod_base = OTHER; note = 2'-O-Methyl-uridine phosphorothioate
  modified_base 100: mod_base = OTHER; note = 2'-O-Methyl-uridine

SEQ ID NO: 2623 - RNA, 103 nt, synthetic construct; identical to SEQ ID NO: 1699
  source 1..103: mol_type = other RNA
  modified_base 1: mod_base = OTHER; note = 2'-O-Methyl-guanosine phosphorothioate
  modified_base 2: mod_base = OTHER; note = 2'-O-Methyl-adenosine phosphorothioate
  modified_base 3: mod_base = OTHER; note = 2'-O-Methyl-guanosine phosphorothioate
  modified_base 21: mod_base = OTHER; note = 2'-O-Methyl-guanosine
  modified_base 25: mod_base = OTHER; note = uridine phosphorothioate
  modified_base 28: mod_base = OTHER; note = 2'-O-Methyl-adenosine
  modified_base 29: mod_base = OTHER; note = 2'-O-Methyl-guanosine
  modified_base 30: mod_base = OTHER; note = 2'-O-Methyl-cytidine
  modified_base 31: mod_base = OTHER; note = 2'-O-Methyl-uridine
  modified_base 32: mod_base = OTHER; note = 2'-O-Methyl-adenosine
  modified_base 33: mod_base = OTHER; note = 2'-O-Methyl-guanosine
  modified_base 34: mod_base = OTHER; note = 2'-O-Methyl-adenosine
  modified_base 35: mod_base = OTHER; note = 2'-O-Methyl-adenosine
  modified_base 36: mod_base = OTHER; note = 2'-O-Methyl-adenosine
  modified_base 37: mod_base = OTHER; note = 2'-O-Methyl-uridine
  modified_base 38: mod_base = OTHER; note = 2'-O-Methyl-adenosine
  modified_base 39: mod_base = OTHER; note = 2'-O-Methyl-guanosine
  modified_base 40: mod_base = OTHER; note = 2'-O-Methyl-cytidine
  modified_base 41: mod_base = OTHER; note = 2'-O-Methyl-adenosine
  modified_base 42: mod_base = OTHER; note = 2'-O-Methyl-adenosine
  modified_base 46: mod_base = OTHER; note = 2'-O-Methyl-adenosine
  modified_base 48: mod_base = OTHER; note = 2'-O-Methyl-adenosine
  modified_base 50: mod_base = OTHER; note = 2'-O-Methyl-uridine
  modified_base 52: mod_base = OTHER; note = 2'-O-Methyl-adenosine
  modified_base 53: mod_base = OTHER; note = 2'-O-Methyl-guanosine
  modified_base 54: mod_base = OTHER; note = 2'-O-Methyl-guanosine
  modified_base 55: mod_base = OTHER; note = 2'-O-Methyl-cytidine
  modified_base 56: mod_base = OTHER; note = 2'-O-Methyl-uridine
  modified_base 57: mod_base = OTHER; note = 2'-O-Methyl-adenosine
  modified_base 60: mod_base = OTHER; note = 2'-O-Methyl-cytidine
  modified_base 61: mod_base = OTHER; note = 2'-O-Methyl-cytidine
  modified_base 66: mod_base = OTHER; note = 2'-O-Methyl-uridine
  modified_base 67: mod_base = OTHER; note = 2'-O-Methyl-cytidine
  modified_base 70: mod_base = OTHER; note = 2'-O-Methyl-cytidine
  modified_base 71: mod_base = OTHER; note = 2'-O-Methyl-uridine
  modified_base 72: mod_base = OTHER; note = 2'-O-Methyl-uridine
  modified_base 73: mod_base = OTHER; note = 2'-O-Methyl-guanosine
  modified_base 74: mod_base = OTHER; note = 2'-O-Methyl-adenosine
  modified_base 75: mod_base = OTHER; note = 2'-O-Methyl-adenosine
  modified_base 76: mod_base = OTHER; note = 2'-O-Methyl-adenosine
  modified_base 77: mod_base = OTHER; note = 2'-O-Methyl-adenosine
  modified_base 78: mod_base = OTHER; note = 2'-O-Methyl-adenosine
  modified_base 79: mod_base = OTHER; note = 2'-O-Methyl-guanosine
  modified_base 80: mod_base = OTHER; note = 2'-O-Methyl-uridine
  modified_base 81: mod_base = OTHER; note = 2'-O-Methyl-guanosine
  modified_base 83: mod_base = OTHER; note = 2'-O-Methyl-cytidine
  modified_base 84: mod_base = OTHER; note = 2'-O-Methyl-adenosine
  modified_base 85: mod_base = OTHER; note = 2'-O-Methyl-cytidine
  modified_base 86: mod_base = OTHER; note = 2'-O-Methyl-cytidine
  modified_base 87: mod_base = OTHER; note = 2'-O-Methyl-guanosine
  modified_base 88: mod_base = OTHER; note = 2'-O-Methyl-adenosine
  modified_base 89: mod_base = OTHER; note = 2'-O-Methyl-guanosine
  modified_base 90: mod_base = OTHER; note = 2'-O-Methyl-uridine
  modified_base 91: mod_base = OTHER; note = 2'-O-Methyl-cytidine
  modified_base 92: mod_base = OTHER; note = 2'-O-Methyl-guanosine
  modified_base 93: mod_base = OTHER; note = 2'-O-Methyl-guanosine
  modified_base 94: mod_base = OTHER; note = 2'-O-Methyl-uridine
  modified_base 95: mod_base = OTHER; note = 2'-O-Methyl-guanosine
  modified_base 96: mod_base = OTHER; note = 2'-O-Methyl-cytidine
  modified_base 97: mod_base = OTHER; note = 2'-O-Methyl-uridine
  modified_base 98: mod_base = OTHER; note = 2'-O-Methyl-uridine phosphorothioate
  modified_base 99: mod_base = OTHER; note = 2'-O-Methyl-uridine phosphorothioate
  modified_base 100: mod_base = OTHER; note = 2'-O-Methyl-uridine

SEQ ID NO: 2624 - RNA, 103 nt, synthetic construct; identical to SEQ ID NO: 1699
  source 1..103: mol_type = other RNA
  modified_base 1: mod_base = OTHER; note = 2'-O-Methyl-guanosine phosphorothioate
  modified_base 2: mod_base = OTHER; note = 2'-O-Methyl-adenosine phosphorothioate
  modified_base 3: mod_base = OTHER; note = 2'-O-Methyl-guanosine phosphorothioate
  modified_base 21: mod_base = OTHER; note = 2'-O-Methyl-guanosine
  modified_base 25: mod_base = OTHER; note = uridine phosphorothioate
  modified_base 28: mod_base = OTHER; note = 2'-O-Methyl-adenosine
  modified_base 29: mod_base = OTHER; note = 2'-O-Methyl-guanosine
  modified_base 30: mod_base = OTHER; note = 2'-O-Methyl-cytidine
  modified_base 31: mod_base = OTHER; note = 2'-O-Methyl-uridine
  modified_base 32: mod_base = OTHER; note = 2'-O-Methyl-adenosine
  modified_base 34: mod_base = OTHER; note = 2'-O-Methyl-adenosine
  modified_base 35: mod_base = OTHER; note = 2'-O-Methyl-adenosine
  modified_base 36: mod_base = OTHER; note = 2'-O-Methyl-adenosine
  modified_base 37: mod_base = OTHER; note = 2'-O-Methyl-uridine
  modified_base 38: mod_base = OTHER; note = 2'-O-Methyl-adenosine
  modified_base 39: mod_base = OTHER; note = 2'-O-Methyl-guanosine
  modified_base 40: mod_base = OTHER; note = 2'-O-Methyl-cytidine
  modified_base 41: mod_base = OTHER; note = 2'-O-Methyl-adenosine
  modified_base 42: mod_base = OTHER; note = 2'-O-Methyl-adenosine
  modified_base 46: mod_base = OTHER; note = 2'-O-Methyl-adenosine
  modified_base 48: mod_base = OTHER; note = 2'-O-Methyl-adenosine
  modified_base 50: mod_base = OTHER; note = 2'-O-Methyl-uridine
  modified_base 52: mod_base = OTHER; note = 2'-O-Methyl-adenosine
  modified_base 53: mod_base = OTHER; note = 2'-O-Methyl-guanosine
  modified_base 54: mod_base = OTHER; note = 2'-O-Methyl-guanosine
  modified_base 55: mod_base = OTHER; note = 2'-O-Methyl-cytidine
  modified_base 56: mod_base = OTHER; note = 2'-O-Methyl-uridine
  modified_base 57: mod_base = OTHER; note = 2'-O-Methyl-adenosine
  modified_base 60: mod_base = OTHER; note = 2'-O-Methyl-cytidine
  modified_base 61: mod_base = OTHER; note = 2'-O-Methyl-cytidine
  modified_base 66: mod_base = OTHER; note = 2'-O-Methyl-uridine
  modified_base 67: mod_base = OTHER; note = 2'-O-Methyl-cytidine
  modified_base 70: mod_base = OTHER; note = 2'-O-Methyl-cytidine
  modified_base 71: mod_base = OTHER; note = 2'-O-Methyl-uridine
  modified_base 72: mod_base = OTHER; note = 2'-O-Methyl-uridine
  modified_base 74: mod_base = OTHER; note = 2'-O-Methyl-adenosine
  modified_base 75: mod_base = OTHER; note = 2'-O-Methyl-adenosine
  modified_base 76: mod_base = OTHER; note = 2'-O-Methyl-adenosine
  modified_base 77: mod_base = OTHER; note = 2'-O-Methyl-adenosine
  modified_base 78: mod_base = OTHER; note = 2'-O-Methyl-adenosine
  modified_base 79: mod_base = OTHER; note = 2'-O-Methyl-guanosine
  modified_base 80: mod_base = OTHER; note = 2'-O-Methyl-uridine
  modified_base 81: mod_base = OTHER; note = 2'-O-Methyl-guanosine
  modified_base 83: mod_base = OTHER; note = 2'-O-Methyl-cytidine
  modified_base 84: mod_base = OTHER; note = 2'-O-Methyl-adenosine
  modified_base 85: mod_base = OTHER; note = 2'-O-Methyl-cytidine
  modified_base 86: mod_base = OTHER; note = 2'-O-Methyl-cytidine
  modified_base 87: mod_base = OTHER; note = 2'-O-Methyl-guanosine
  modified_base 88: mod_base = OTHER; note = 2'-O-Methyl-adenosine
  modified_base 89: mod_base = OTHER; note = 2'-O-Methyl-guanosine
  modified_base 90: mod_base = OTHER; note = 2'-O-Methyl-uridine
  modified_base 91: mod_base = OTHER; note = 2'-O-Methyl-cytidine
  modified_base 92: mod_base = OTHER; note = 2'-O-Methyl-guanosine
  modified_base 93: mod_base = OTHER; note = 2'-O-Methyl-guanosine
  modified_base 94: mod_base = OTHER; note = 2'-O-Methyl-uridine
  modified_base 95: mod_base = OTHER; note = 2'-O-Methyl-guanosine
  modified_base 96: mod_base = OTHER; note = 2'-O-Methyl-cytidine
  modified_base 97: mod_base = OTHER; note = 2'-O-Methyl-uridine
  modified_base 98: mod_base = OTHER; note = 2'-O-Methyl-uridine phosphorothioate
  modified_base 99: mod_base = OTHER; note = 2'-O-Methyl-uridine phosphorothioate
  modified_base 100: mod_base = OTHER; note = 2'-O-Methyl-uridine

SEQ ID NO: 2625 - RNA, 103 nt, synthetic construct; identical to SEQ ID NO: 1700
  source 1..103: mol_type = other RNA
  modified_base 1: mod_base = OTHER; note = 2'-O-Methyl-cytidine phosphorothioate
  modified_base 2: mod_base = OTHER; note = 2'-O-Methyl-adenosine phosphorothioate
  modified_base 3: mod_base = OTHER; note = 2'-O-Methyl-guanosine phosphorothioate
  modified_base 21: mod_base = OTHER; note = 2'-O-Methyl-guanosine
  modified_base 25: mod_base = OTHER; note = uridine phosphorothioate
  modified_base 28: mod_base = OTHER; note = 2'-O-Methyl-adenosine
  modified_base 29: mod_base = OTHER; note = 2'-O-Methyl-guanosine
  modified_base 30: mod_base = OTHER; note = 2'-O-Methyl-cytidine
  modified_base 31: mod_base = OTHER; note = 2'-O-Methyl-uridine
  modified_base 32: mod_base = OTHER; note = 2'-O-Methyl-adenosine
  modified_base 33: mod_base = OTHER; note = 2'-O-Methyl-guanosine
  modified_base 34: mod_base = OTHER; note = 2'-O-Methyl-adenosine
  modified_base 35: mod_base = OTHER; note = 2'-O-Methyl-adenosine
  modified_base 36: mod_base = OTHER; note = 2'-O-Methyl-adenosine
  modified_base 37: mod_base = OTHER; note = 2'-O-Methyl-uridine
  modified_base 38: mod_base = OTHER; note = 2'-O-Methyl-adenosine
  modified_base 39: mod_base = OTHER; note = 2'-O-Methyl-guanosine
  modified_base 40: mod_base = OTHER; note = 2'-O-Methyl-cytidine
  modified_base 41: mod_base = OTHER; note = 2'-O-Methyl-adenosine
  modified_base 42: mod_base = OTHER; note = 2'-O-Methyl-adenosine
  modified_base 46: mod_base = OTHER; note = 2'-O-Methyl-adenosine
  modified_base 48: mod_base = OTHER; note = 2'-O-Methyl-adenosine
  modified_base 50: mod_base = OTHER; note = 2'-O-Methyl-uridine
  modified_base 52: mod_base = OTHER; note = 2'-O-Methyl-adenosine
  modified_base 53: mod_base = OTHER; note = 2'-O-Methyl-guanosine
  modified_base 54: mod_base = OTHER; note = 2'-O-Methyl-guanosine
  modified_base 57: mod_base = OTHER; note = 2'-O-Methyl-adenosine
  modified_base 61: mod_base = OTHER; note = 2'-O-Methyl-cytidine
  modified_base 66: mod_base = OTHER; note = 2'-O-Methyl-uridine
  modified_base 67: mod_base = OTHER; note = 2'-O-Methyl-cytidine
  modified_base 70: mod_base = OTHER; note = 2'-O-Methyl-cytidine
  modified_base 71: mod_base = OTHER; note = 2'-O-Methyl-uridine
  modified_base 72: mod_base = OTHER; note = 2'-O-Methyl-uridine
  modified_base 74: mod_base = OTHER; note = 2'-O-Methyl-adenosine
  modified_base 75: mod_base = OTHER; note = 2'-O-Methyl-adenosine
  modified_base 76: mod_base = OTHER; note = 2'-O-Methyl-adenosine
  modified_base 77: mod_base = OTHER; note = 2'-O-Methyl-adenosine
  modified_base 78: mod_base = OTHER; note = 2'-O-Methyl-adenosine
  modified_base 79: mod_base = OTHER; note = 2'-O-Methyl-guanosine
  modified_base 80: mod_base = OTHER; note = 2'-O-Methyl-uridine
  modified_base 82: mod_base = OTHER; note = 2'-O-Methyl-guanosine
  modified_base 83: mod_base = OTHER; note = 2'-O-Methyl-cytidine
  modified_base 84: mod_base = OTHER; note = 2'-O-Methyl-adenosine
  modified_base 85: mod_base = OTHER; note = 2'-O-Methyl-cytidine
  modified_base 86: mod_base = OTHER; note = 2'-O-Methyl-cytidine
  modified_base 87: mod_base = OTHER; note = 2'-O-Methyl-guanosine
  modified_base 89: mod_base = OTHER; note = 2'-O-Methyl-guanosine
  modified_base 92: mod_base = OTHER; note = 2'-O-Methyl-guanosine
  modified_base 93: mod_base = OTHER; note = 2'-O-Methyl-guanosine
  modified_base 94: mod_base = OTHER; note = 2'-O-Methyl-uridine
  modified_base 95: mod_base = OTHER; note = 2'-O-Methyl-guanosine
  modified_base 96: mod_base = OTHER; note = 2'-O-Methyl-cytidine
  modified_base 97: mod_base = OTHER; note = 2'-O-Methyl-uridine
  modified_base 98: mod_base = OTHER; note = 2'-O-Methyl-uridine phosphorothioate
  modified_base 99: mod_base = OTHER; note = 2'-O-Methyl-uridine phosphorothioate
  modified_base 100: mod_base = OTHER; note = 2'-O-Methyl-uridine

SEQ ID NO: 2626 - RNA, 103 nt, synthetic construct; identical to SEQ ID NO: 1700
  source 1..103: mol_type = other RNA
  modified_base 1: mod_base = OTHER; note = 2'-O-Methyl-cytidine phosphorothioate
  modified_base 2: mod_base = OTHER; note = 2'-O-Methyl-adenosine phosphorothioate
  modified_base 3: mod_base = OTHER; note = 2'-O-Methyl-guanosine phosphorothioate
  modified_base 21: mod_base = OTHER; note = 2'-O-Methyl-guanosine
  modified_base 25: mod_base = OTHER; note = uridine phosphorothioate
  modified_base 28: mod_base = OTHER; note = 2'-O-Methyl-adenosine
  modified_base 29: mod_base = OTHER; note = 2'-O-Methyl-guanosine
  modified_base 30: mod_base = OTHER; note = 2'-O-Methyl-cytidine
  modified_base 31: mod_base = OTHER; note = 2'-O-Methyl-uridine
  modified_base 32: mod_base = OTHER; note = 2'-O-Methyl-adenosine
  modified_base 33: mod_base = OTHER; note = 2'-O-Methyl-guanosine
  modified_base 34: mod_base = OTHER; note = 2'-O-Methyl-adenosine
  modified_base 35: mod_base = OTHER; note = 2'-O-Methyl-adenosine
  modified_base 36: mod_base = OTHER; note = 2'-O-Methyl-adenosine
  modified_base 37: mod_base = OTHER; note = 2'-O-Methyl-uridine
  modified_base 38: mod_base = OTHER; note = 2'-O-Methyl-adenosine
  modified_base 39: mod_base = OTHER; note = 2'-O-Methyl-guanosine
  modified_base 40: mod_base = OTHER; note = 2'-O-Methyl-cytidine
  modified_base 41: mod_base = OTHER; note = 2'-O-Methyl-adenosine
  modified_base 42: mod_base = OTHER; note = 2'-O-Methyl-adenosine
  modified_base 46: mod_base = OTHER; note = 2'-O-Methyl-adenosine
  modified_base 48: mod_base = OTHER; note = 2'-O-Methyl-adenosine
  modified_base 50: mod_base = OTHER; note = 2'-O-Methyl-uridine
  modified_base 52: mod_base = OTHER; note = 2'-O-Methyl-adenosine
  modified_base 53: mod_base = OTHER; note = 2'-O-Methyl-guanosine
  modified_base 54: mod_base = OTHER; note = 2'-O-Methyl-guanosine
  modified_base 55: mod_base = OTHER; note = 2'-O-Methyl-cytidine
  modified_base 56: mod_base = OTHER; note = 2'-O-Methyl-uridine
  modified_base 57: mod_base = OTHER; note = 2'-O-Methyl-adenosine
  modified_base 60: mod_base = OTHER; note = 2'-O-Methyl-cytidine
  modified_base 61: mod_base = OTHER; note = 2'-O-Methyl-cytidine
  modified_base 66: mod_base = OTHER; note = 2'-O-Methyl-uridine
  modified_base 67: mod_base = OTHER; note = 2'-O-Methyl-cytidine
  modified_base 70: mod_base = OTHER; note = 2'-O-Methyl-cytidine
  modified_base 71: mod_base = OTHER; note = 2'-O-Methyl-uridine
  modified_base 72: mod_base = OTHER; note = 2'-O-Methyl-uridine
  modified_base 74: mod_base = OTHER; note = 2'-O-Methyl-adenosine
  modified_base 75: mod_base = OTHER; note = 2'-O-Methyl-adenosine
  modified_base 76: mod_base = OTHER; note = 2'-O-Methyl-adenosine
  modified_base 77: mod_base = OTHER; note = 2'-O-Methyl-adenosine
  modified_base 78: mod_base = OTHER; note = 2'-O-Methyl-adenosine
  modified_base 79: mod_base = OTHER; note = 2'-O-Methyl-guanosine
  modified_base 80: mod_base = OTHER; note = 2'-O-Methyl-uridine
  modified_base 82: mod_base = OTHER; note = 2'-O-Methyl-guanosine
  modified_base 83: mod_base = OTHER; note = 2'-O-Methyl-cytidine
  modified_base 84: mod_base = OTHER; note = 2'-O-Methyl-adenosine
  modified_base 85: mod_base = OTHER; note = 2'-O-Methyl-cytidine
  modified_base 86: mod_base = OTHER; note = 2'-O-Methyl-cytidine
  modified_base 87: mod_base = OTHER; note = 2'-O-Methyl-guanosine
  modified_base 89: mod_base = OTHER; note = 2'-O-Methyl-guanosine
  modified_base 92: mod_base = OTHER; note = 2'-O-Methyl-guanosine
  modified_base 93: mod_base = OTHER; note = 2'-O-Methyl-guanosine
  modified_base 94: mod_base = OTHER; note = 2'-O-Methyl-uridine
  modified_base 95: mod_base = OTHER; note = 2'-O-Methyl-guanosine
  modified_base 96: mod_base = OTHER; note = 2'-O-Methyl-cytidine
  modified_base 97: mod_base = OTHER; note = 2'-O-Methyl-uridine
  modified_base 98: mod_base = OTHER; note = 2'-O-Methyl-uridine phosphorothioate
  modified_base 99: mod_base = OTHER; note = 2'-O-Methyl-uridine phosphorothioate
  modified_base 100: mod_base = OTHER; note = 2'-O-Methyl-uridine

SEQ ID NO: 2627 - RNA, 103 nt, synthetic construct; identical to SEQ ID NO: 1700
  source 1..103: mol_type = other RNA
  modified_base 1: mod_base = OTHER; note = 2'-O-Methyl-cytidine phosphorothioate
  modified_base 2: mod_base = OTHER; note = 2'-O-Methyl-adenosine phosphorothioate
  modified_base 3: mod_base = OTHER; note = 2'-O-Methyl-guanosine phosphorothioate
  modified_base 21: mod_base = OTHER; note = 2'-O-Methyl-guanosine
  modified_base 25: mod_base = OTHER; note = uridine phosphorothioate
  modified_base 28: mod_base = OTHER; note = 2'-O-Methyl-adenosine
  modified_base 29: mod_base = OTHER; note = 2'-O-Methyl-guanosine
  modified_base 30: mod_base = OTHER; note = 2'-O-Methyl-cytidine
  modified_base 31: mod_base = OTHER; note = 2'-O-Methyl-uridine
  modified_base 32: mod_base = OTHER; note = 2'-O-Methyl-adenosine
  modified_base 33: mod_base = OTHER; note = 2'-O-Methyl-guanosine
  modified_base 34: mod_base = OTHER; note = 2'-O-Methyl-adenosine
  modified_base 35: mod_base = OTHER; note = 2'-O-Methyl-adenosine
  modified_base 36: mod_base = OTHER; note = 2'-O-Methyl-adenosine
  modified_base 37: mod_base = OTHER; note = 2'-O-Methyl-uridine
  modified_base 38: mod_base = OTHER; note = 2'-O-Methyl-adenosine
  modified_base 39: mod_base = OTHER; note = 2'-O-Methyl-guanosine
  modified_base 40: mod_base = OTHER; note = 2'-O-Methyl-cytidine
  modified_base 41: mod_base = OTHER; note = 2'-O-Methyl-adenosine
  modified_base 42: mod_base = OTHER; note = 2'-O-Methyl-adenosine
  modified_base 46: mod_base = OTHER; note = 2'-O-Methyl-adenosine
  modified_base 48: mod_base = OTHER; note = 2'-O-Methyl-adenosine
  modified_base 50: mod_base = OTHER; note = 2'-O-Methyl-uridine
  modified_base 52: mod_base = OTHER; note = 2'-O-Methyl-adenosine
  modified_base 53: mod_base = OTHER; note = 2'-O-Methyl-guanosine
  modified_base 54: mod_base = OTHER; note = 2'-O-Methyl-guanosine
  modified_base 57: mod_base = OTHER; note = 2'-O-Methyl-adenosine
  modified_base 61: mod_base = OTHER; note = 2'-O-Methyl-cytidine
  modified_base 66: mod_base = OTHER; note = 2'-O-Methyl-uridine
  modified_base 67: mod_base = OTHER; note = 2'-O-Methyl-cytidine
  modified_base 70: mod_base = OTHER; note = 2'-O-Methyl-cytidine
  modified_base 71: mod_base = OTHER; note = 2'-O-Methyl-uridine
  modified_base 72: mod_base = OTHER; note = 2'-O-Methyl-uridine
  modified_base 73: mod_base = OTHER; note = 2'-O-Methyl-guanosine
  modified_base 74: mod_base = OTHER; note = 2'-O-Methyl-adenosine
  modified_base 75: mod_base = OTHER; note = 2'-O-Methyl-adenosine
  modified_base 76: mod_base = OTHER; note = 2'-O-Methyl-adenosine
  modified_base 77: mod_base = OTHER; note = 2'-O-Methyl-adenosine
  modified_base 78: mod_base = OTHER; note = 2'-O-Methyl-adenosine
  modified_base 79: mod_base = OTHER; note = 2'-O-Methyl-guanosine
  modified_base 80: mod_base = OTHER; note = 2'-O-Methyl-uridine
  modified_base 82: mod_base = OTHER; note = 2'-O-Methyl-guanosine
  modified_base 83: mod_base = OTHER; note = 2'-O-Methyl-cytidine
  modified_base 84: mod_base = OTHER; note = 2'-O-Methyl-adenosine
  modified_base 85: mod_base = OTHER; note = 2'-O-Methyl-cytidine
  modified_base 86: mod_base = OTHER; note = 2'-O-Methyl-cytidine
  modified_base 87: mod_base = OTHER; note = 2'-O-Methyl-guanosine
  modified_base 89: mod_base = OTHER; note = 2'-O-Methyl-guanosine
  modified_base 92: mod_base = OTHER; note = 2'-O-Methyl-guanosine
  modified_base 93: mod_base = OTHER; note = 2'-O-Methyl-guanosine
  modified_base 94: mod_base = OTHER; note = 2'-O-Methyl-uridine
  modified_base 95: mod_base = OTHER; note = 2'-O-Methyl-guanosine
  modified_base 96: mod_base = OTHER; note = 2'-O-Methyl-cytidine
  modified_base 97: mod_base = OTHER; note = 2'-O-Methyl-uridine
  modified_base 98: mod_base = OTHER; note = 2'-O-Methyl-uridine phosphorothioate
  modified_base 99: mod_base = OTHER; note = 2'-O-Methyl-uridine phosphorothioate
  modified_base 100: mod_base = OTHER; note = 2'-O-Methyl-uridine

SEQ ID NO: 2628 - RNA, 103 nt, synthetic construct; identical to SEQ ID NO: 1700
  source 1..103: mol_type = other RNA
  modified_base 1: mod_base = OTHER; note = 2'-O-Methyl-cytidine phosphorothioate
  modified_base 2: mod_base = OTHER; note = 2'-O-Methyl-adenosine phosphorothioate
  modified_base 3: mod_base = OTHER; note = 2'-O-Methyl-guanosine phosphorothioate
  modified_base 21: mod_base = OTHER; note = 2'-O-Methyl-guanosine
  modified_base 25: mod_base = OTHER; note = uridine phosphorothioate
  modified_base 28: mod_base = OTHER; note = 2'-O-Methyl-adenosine
  modified_base 29: mod_base = OTHER; note = 2'-O-Methyl-guanosine
  modified_base 30: mod_base = OTHER; note = 2'-O-Methyl-cytidine
  modified_base 31: mod_base = OTHER; note = 2'-O-Methyl-uridine
  modified_base 32: mod_base = OTHER; note = 2'-O-Methyl-adenosine
  modified_base 33: mod_base = OTHER; note = 2'-O-Methyl-guanosine
  modified_base 34: mod_base = OTHER; note = 2'-O-Methyl-adenosine
  modified_base 35: mod_base = OTHER; note = 2'-O-Methyl-adenosine
  modified_base 36: mod_base = OTHER; note = 2'-O-Methyl-adenosine
  modified_base 37: mod_base = OTHER; note = 2'-O-Methyl-uridine
  modified_base 38: mod_base = OTHER; note = 2'-O-Methyl-adenosine
  modified_base 39: mod_base = OTHER; note = 2'-O-Methyl-guanosine
  modified_base 40: mod_base = OTHER; note = 2'-O-Methyl-cytidine
  modified_base 41: mod_base = OTHER; note = 2'-O-Methyl-adenosine
  modified_base 42: mod_base = OTHER; note = 2'-O-Methyl-adenosine
  modified_base 46: mod_base = OTHER; note = 2'-O-Methyl-adenosine
  modified_base 48: mod_base = OTHER; note = 2'-O-Methyl-adenosine
  modified_base 50: mod_base = OTHER; note = 2'-O-Methyl-uridine
  modified_base 52: mod_base = OTHER; note = 2'-O-Methyl-adenosine
  modified_base 53: mod_base = OTHER; note = 2'-O-Methyl-guanosine
  modified_base 54: mod_base = OTHER; note = 2'-O-Methyl-guanosine
  modified_base 57: mod_base = OTHER; note = 2'-O-Methyl-adenosine
  modified_base 61: mod_base = OTHER; note = 2'-O-Methyl-cytidine
  modified_base 66: mod_base = OTHER; note = 2'-O-Methyl-uridine
  modified_base 67: mod_base = OTHER; note = 2'-O-Methyl-cytidine
  modified_base 70: mod_base = OTHER; note = 2'-O-Methyl-cytidine
  modified_base 71: mod_base = OTHER; note = 2'-O-Methyl-uridine
  modified_base 72: mod_base = OTHER; note = 2'-O-Methyl-uridine
  modified_base 73: mod_base = OTHER; note = 2'-O-Methyl-guanosine
  modified_base 74: mod_base = OTHER; note = 2'-O-Methyl-adenosine
  modified_base 75: mod_base = OTHER; note = 2'-O-Methyl-adenosine
  modified_base 76: mod_base = OTHER; note = 2'-O-Methyl-adenosine
  modified_base 77: mod_base = OTHER; note = 2'-O-Methyl-adenosine
  modified_base 78: mod_base = OTHER; note = 2'-O-Methyl-adenosine
  modified_base 79: mod_base = OTHER; note = 2'-O-Methyl-guanosine
  modified_base 80: mod_base = OTHER; note = 2'-O-Methyl-uridine
  modified_base 82: mod_base = OTHER; note = 2'-O-Methyl-guanosine
  modified_base 83: mod_base = OTHER; note = 2'-O-Methyl-cytidine
  modified_base 84: mod_base = OTHER; note = 2'-O-Methyl-adenosine
  modified_base 85: mod_base = OTHER; note = 2'-O-Methyl-cytidine
  modified_base 86: mod_base = OTHER; note = 2'-O-Methyl-cytidine
  modified_base 87: mod_base = OTHER; note = 2'-O-Methyl-guanosine
  modified_base 89: mod_base = OTHER; note = 2'-O-Methyl-guanosine
  modified_base 91: mod_base = OTHER; note = 2'-O-Methyl-cytidine
  modified_base 92: mod_base = OTHER; note = 2'-O-Methyl-guanosine
  modified_base 93: mod_base = OTHER; note = 2'-O-Methyl-guanosine
  modified_base 94: mod_base = OTHER; note = 2'-O-Methyl-uridine
  modified_base 95: mod_base = OTHER; note = 2'-O-Methyl-guanosine
  modified_base 96: mod_base = OTHER; note = 2'-O-Methyl-cytidine
  modified_base 97: mod_base = OTHER; note = 2'-O-Methyl-uridine
  modified_base 98: mod_base = OTHER; note = 2'-O-Methyl-uridine phosphorothioate
  modified_base 99: mod_base = OTHER; note = 2'-O-Methyl-uridine phosphorothioate
  modified_base 100: mod_base = OTHER; note = 2'-O-Methyl-uridine

SEQ ID NO: 2629 - RNA, 103 nt, synthetic construct; identical to SEQ ID NO: 1700
  source 1..103: mol_type = other RNA
  modified_base 1: mod_base = OTHER; note = 2'-O-Methyl-cytidine phosphorothioate
  modified_base 2: mod_base = OTHER; note = 2'-O-Methyl-adenosine phosphorothioate
  modified_base 3: mod_base = OTHER; note = 2'-O-Methyl-guanosine phosphorothioate
  modified_base 21: mod_base = OTHER; note = 2'-O-Methyl-guanosine
  modified_base 25: mod_base = OTHER; note = uridine phosphorothioate
  modified_base 28: mod_base = OTHER; note = 2'-O-Methyl-adenosine
  modified_base 29: mod_base = OTHER; note = 2'-O-Methyl-guanosine
  modified_base 30: mod_base = OTHER; note = 2'-O-Methyl-cytidine
  modified_base 31: mod_base = OTHER; note = 2'-O-Methyl-uridine
  modified_base 32: mod_base = OTHER; note = 2'-O-Methyl-adenosine
  modified_base 34: mod_base = OTHER; note = 2'-O-Methyl-adenosine
  modified_base 35: mod_base = OTHER; note = 2'-O-Methyl-adenosine
  modified_base 36: mod_base = OTHER; note = 2'-O-Methyl-adenosine
  modified_base 37: mod_base = OTHER; note = 2'-O-Methyl-uridine
  modified_base 38: mod_base = OTHER; note = 2'-O-Methyl-adenosine
  modified_base 39: mod_base = OTHER; note = 2'-O-Methyl-guanosine
  modified_base 40: mod_base = OTHER; note = 2'-O-Methyl-cytidine
  modified_base 41: mod_base = OTHER; note = 2'-O-Methyl-adenosine
  modified_base 42: mod_base = OTHER; note = 2'-O-Methyl-adenosine
  modified_base 46: mod_base = OTHER; note = 2'-O-Methyl-adenosine
  modified_base 48: mod_base = OTHER; note = 2'-O-Methyl-adenosine
  modified_base 50: mod_base = OTHER; note = 2'-O-Methyl-uridine
  modified_base 52: mod_base = OTHER; note = 2'-O-Methyl-adenosine
  modified_base 53: mod_base = OTHER; note = 2'-O-Methyl-guanosine
  modified_base 54: mod_base = OTHER; note = 2'-O-Methyl-guanosine
  modified_base 57: mod_base = OTHER; note = 2'-O-Methyl-adenosine
  modified_base 61: mod_base = OTHER; note = 2'-O-Methyl-cytidine
  modified_base 66: mod_base = OTHER; note = 2'-O-Methyl-uridine
  modified_base 67: mod_base = OTHER; note = 2'-O-Methyl-cytidine
  modified_base 70: mod_base = OTHER; note = 2'-O-Methyl-cytidine
  modified_base 71: mod_base = OTHER; note = 2'-O-Methyl-uridine
  modified_base 72: mod_base = OTHER; note = 2'-O-Methyl-uridine
  modified_base 73: mod_base = OTHER; note = 2'-O-Methyl-guanosine
  modified_base 74: mod_base = OTHER; note = 2'-O-Methyl-adenosine
  modified_base 75: mod_base = OTHER; note = 2'-O-Methyl-adenosine
  modified_base 76: mod_base = OTHER; note = 2'-O-Methyl-adenosine
  modified_base 77: mod_base = OTHER; note = 2'-O-Methyl-adenosine
  modified_base 78: mod_base = OTHER; note = 2'-O-Methyl-adenosine
  modified_base 79: mod_base = OTHER; note = 2'-O-Methyl-guanosine
  modified_base 80: mod_base = OTHER; note = 2'-O-Methyl-uridine
  modified_base 82: mod_base = OTHER; note = 2'-O-Methyl-guanosine
  modified_base 83: mod_base = OTHER; note = 2'-O-Methyl-cytidine
  modified_base 84: mod_base = OTHER; note = 2'-O-Methyl-adenosine
  modified_base 85: mod_base = OTHER; note = 2'-O-Methyl-cytidine
  modified_base 86: mod_base = OTHER; note = 2'-O-Methyl-cytidine
  modified_base 87: mod_base = OTHER; note = 2'-O-Methyl-guanosine
  modified_base 89: mod_base = OTHER; note = 2'-O-Methyl-guanosine
  modified_base 91: mod_base = OTHER; note = 2'-O-Methyl-cytidine
  modified_base 92: mod_base = OTHER; note = 2'-O-Methyl-guanosine
  modified_base 93: mod_base = OTHER; note = 2'-O-Methyl-guanosine
  modified_base 94: mod_base = OTHER; note = 2'-O-Methyl-uridine
  modified_base 95: mod_base = OTHER; note = 2'-O-Methyl-guanosine
  modified_base 96: mod_base = OTHER; note = 2'-O-Methyl-cytidine
  modified_base 97: mod_base = OTHER; note = 2'-O-Methyl-uridine
  modified_base 98: mod_base = OTHER; note = 2'-O-Methyl-uridine phosphorothioate
  modified_base 99: mod_base = OTHER; note = 2'-O-Methyl-uridine phosphorothioate
  modified_base 100: mod_base = OTHER; note = 2'-O-Methyl-uridine

SEQ ID NO: 2630 - RNA, 103 nt, synthetic construct; identical to SEQ ID NO: 1700
  source 1..103: mol_type = other RNA
  modified_base 1: mod_base = OTHER; note = 2'-O-Methyl-cytidine phosphorothioate
  modified_base 2: mod_base = OTHER; note = 2'-O-Methyl-adenosine phosphorothioate
  modified_base 3: mod_base = OTHER; note = 2'-O-Methyl-guanosine phosphorothioate
  modified_base 21: mod_base = OTHER; note = 2'-O-Methyl-guanosine
  modified_base 25: mod_base = OTHER; note = uridine phosphorothioate
  modified_base 28: mod_base = OTHER; note = 2'-O-Methyl-adenosine
  modified_base 29: mod_base = OTHER; note = 2'-O-Methyl-guanosine
  modified_base 30: mod_base = OTHER; note = 2'-O-Methyl-cytidine
  modified_base 31: mod_base = OTHER; note = 2'-O-Methyl-uridine
  modified_base 32: mod_base = OTHER; note = 2'-O-Methyl-adenosine
  modified_base 34: mod_base = OTHER; note = 2'-O-Methyl-adenosine
  modified_base 35: mod_base = OTHER; note = 2'-O-Methyl-adenosine
  modified_base 36: mod_base = OTHER; note = 2'-O-Methyl-adenosine
  modified_base 37: mod_base = OTHER; note = 2'-O-Methyl-uridine
  modified_base 38: mod_base = OTHER; note = 2'-O-Methyl-adenosine
  modified_base 39: mod_base = OTHER; note = 2'-O-Methyl-guanosine
  modified_base 40: mod_base = OTHER; note = 2'-O-Methyl-cytidine
  modified_base 41: mod_base = OTHER; note = 2'-O-Methyl-adenosine
  modified_base 42: mod_base = OTHER; note = 2'-O-Methyl-adenosine
  modified_base 46: mod_base = OTHER; note = 2'-O-Methyl-adenosine
  modified_base 48: mod_base = OTHER; note = 2'-O-Methyl-adenosine
  modified_base 50: mod_base = OTHER; note = 2'-O-Methyl-uridine
  modified_base 52: mod_base = OTHER; note = 2'-O-Methyl-adenosine
  modified_base 53: mod_base = OTHER; note = 2'-O-Methyl-guanosine
  modified_base 54: mod_base = OTHER; note = 2'-O-Methyl-guanosine
  modified_base 55: mod_base = OTHER; note = 2'-O-Methyl-cytidine
  modified_base 56: mod_base = OTHER; note = 2'-O-Methyl-uridine
  modified_base 57: mod_base = OTHER; note = 2'-O-Methyl-adenosine
  modified_base 60: mod_base = OTHER; note = 2'-O-Methyl-cytidine
  modified_base 61: mod_base = OTHER; note = 2'-O-Methyl-cytidine
  modified_base 66: mod_base = OTHER; note = 2'-O-Methyl-uridine
  modified_base 67: mod_base = OTHER; note = 2'-O-Methyl-cytidine
  modified_base 70: mod_base = OTHER; note = 2'-O-Methyl-cytidine
  modified_base 71: mod_base = OTHER; note = 2'-O-Methyl-uridine
  modified_base 72: mod_base = OTHER; note = 2'-O-Methyl-uridine
  modified_base 74: mod_base = OTHER; note = 2'-O-Methyl-adenosine
  modified_base 75: mod_base = OTHER; note = 2'-O-Methyl-adenosine
  modified_base 76: mod_base = OTHER; note = 2'-O-Methyl-adenosine
  modified_base 77: mod_base = OTHER; note = 2'-O-Methyl-adenosine
  modified_base 78: mod_base = OTHER; note = 2'-O-Methyl-adenosine
  modified_base 79: mod_base = OTHER; note = 2'-O-Methyl-guanosine
  modified_base 80: mod_base = OTHER; note = 2'-O-Methyl-uridine
  modified_base 82: mod_base = OTHER; note = 2'-O-Methyl-guanosine
  modified_base 83: mod_base = OTHER; note = 2'-O-Methyl-cytidine
  modified_base 84: mod_base = OTHER; note = 2'-O-Methyl-adenosine
  modified_base 85: mod_base = OTHER; note = 2'-O-Methyl-cytidine
  modified_base 86: mod_base = OTHER; note = 2'-O-Methyl-cytidine
  modified_base 87: mod_base = OTHER; note = 2'-O-Methyl-guanosine
  modified_base 89: mod_base = OTHER; note = 2'-O-Methyl-guanosine
  modified_base 92: mod_base = OTHER; note = 2'-O-Methyl-guanosine
  modified_base 93: mod_base = OTHER; note = 2'-O-Methyl-guanosine
  modified_base 94: mod_base = OTHER; note = 2'-O-Methyl-uridine
  modified_base 95: mod_base = OTHER; note = 2'-O-Methyl-guanosine
  modified_base 96: mod_base = OTHER; note = 2'-O-Methyl-cytidine
  modified_base 97: mod_base = OTHER; note = 2'-O-Methyl-uridine
  modified_base 98: mod_base = OTHER; note = 2'-O-Methyl-uridine phosphorothioate
  modified_base 99: mod_base = OTHER; note = 2'-O-Methyl-uridine phosphorothioate
  modified_base 100: mod_base = OTHER; note = 2'-O-Methyl-uridine

SEQ ID NO: 2631 - RNA, 103 nt, synthetic construct; identical to SEQ ID NO: 1643
  source 1..103: mol_type = other RNA
  modified_base 1: mod_base = OTHER; note = 2'-O-Methyl-cytidine phosphorothioate
  modified_base 2: mod_base = OTHER; note = 2'-O-Methyl-cytidine phosphorothioate
  modified_base 3: mod_base = OTHER; note = 2'-O-Methyl-cytidine phosphorothioate
  modified_base 21: mod_base = OTHER; note = 2'-O-Methyl-guanosine
  modified_base 28: mod_base = OTHER; note = 2'-O-Methyl-adenosine
  modified_base 29: mod_base = OTHER; note = 2'-O-Methyl-guanosine
  modified_base 30: mod_base = OTHER; note = 2'-O-Methyl-cytidine
  modified_base 31: mod_base = OTHER; note = 2'-O-Methyl-uridine
  modified_base 32: mod_base = OTHER; note = 2'-O-Methyl-adenosine
  modified_base 34: mod_base = OTHER; note = 2'-O-Methyl-adenosine
  modified_base 35: mod_base = OTHER; note = 2'-O-Methyl-adenosine
  modified_base 36: mod_base = OTHER; note = 2'-O-Methyl-adenosine
  modified_base 37: mod_base = OTHER; note = 2'-O-Methyl-uridine
  modified_base 38: mod_base = OTHER; note = 2'-O-Methyl-adenosine
  modified_base 39: mod_base = OTHER; note = 2'-O-Methyl-guanosine
  modified_base 40: mod_base = OTHER; note = 2'-O-Methyl-cytidine
  modified_base 41: mod_base = OTHER; note = 2'-O-Methyl-adenosine
  modified_base 42: mod_base = OTHER; note = 2'-O-Methyl-adenosine
  modified_base 45: mod_base = OTHER; note = uridine phosphorothioate
  modified_base 46: mod_base = OTHER; note = 2'-O-Methyl-adenosine
  modified_base 48: mod_base = OTHER; note = 2'-O-Methyl-adenosine
  modified_base 50: mod_base = OTHER; note = 2'-O-Methyl-uridine
  modified_base 52: mod_base = OTHER; note = 2'-O-Methyl-adenosine
  modified_base 53: mod_base = OTHER; note = 2'-O-Methyl-guanosine
  modified_base 54: mod_base = OTHER; note = 2'-O-Methyl-guanosine
  modified_base 57: mod_base = OTHER; note = 2'-O-Methyl-adenosine
  modified_base 61: mod_base = OTHER; note = 2'-O-Methyl-cytidine
  modified_base 64: mod_base = OTHER; note = uridine phosphorothioate
  modified_base 66: mod_base = OTHER; note = 2'-O-Methyl-uridine
  modified_base 67: mod_base = OTHER; note = 2'-O-Methyl-cytidine
  modified_base 70: mod_base = OTHER; note = 2'-O-Methyl-cytidine
  modified_base 71: mod_base = OTHER; note = 2'-O-Methyl-uridine
  modified_base 72: mod_base = OTHER; note = 2'-O-Methyl-uridine
  modified_base 74: mod_base = OTHER; note = 2'-O-Methyl-adenosine
  modified_base 75: mod_base = OTHER; note = 2'-O-Methyl-adenosine
  modified_base 76: mod_base = OTHER; note = 2'-O-Methyl-adenosine
  modified_base 77: mod_base = OTHER; note = 2'-O-Methyl-adenosine
  modified_base 78: mod_base = OTHER; note = 2'-O-Methyl-adenosine
  modified_base 79: mod_base = OTHER; note = 2'-O-Methyl-guanosine
  modified_base 80: mod_base = OTHER; note = 2'-O-Methyl-uridine
  modified_base 82: mod_base = OTHER; note = 2'-O-Methyl-guanosine
  modified_base 83: mod_base = OTHER; note = 2'-O-Methyl-cytidine
  modified_base 84: mod_base = OTHER; note = 2'-O-Methyl-adenosine
  modified_base 85: mod_base = OTHER; note = 2'-O-Methyl-cytidine
  modified_base 86: mod_base = OTHER; note = 2'-O-Methyl-cytidine
  modified_base 87: mod_base = OTHER; note = 2'-O-Methyl-guanosine
  modified_base 89: mod_base = OTHER; note = 2'-O-Methyl-guanosine
  modified_base 92: mod_base = OTHER; note = 2'-O-Methyl-guanosine
  modified_base 93: mod_base = OTHER; note = 2'-O-Methyl-guanosine
  modified_base 94: mod_base = OTHER; note = 2'-O-Methyl-uridine
  modified_base 95: mod_base = OTHER; note = 2'-O-Methyl-guanosine
  modified_base 96: mod_base = OTHER; note = 2'-O-Methyl-cytidine
  modified_base 97: mod_base = OTHER; note = 2'-O-Methyl-uridine
  modified_base 98: mod_base = OTHER; note = 2'-O-Methyl-uridine phosphorothioate
  modified_base 99: mod_base = OTHER; note = 2'-O-Methyl-uridine phosphorothioate
  modified_base 100: mod_base = OTHER; note = 2'-O-Methyl-uridine

SEQ ID NO: 2632 - RNA, 103 nt, synthetic construct; identical to SEQ ID NO: 1643
  source 1..103: mol_type = other RNA
  modified_base 1: mod_base = OTHER; note = 2'-O-Methyl-cytidine phosphorothioate
  modified_base 2: mod_base = OTHER; note = 2'-O-Methyl-cytidine phosphorothioate
  modified_base 3: mod_base = OTHER; note = 2'-O-Methyl-cytidine phosphorothioate
  modified_base 21: mod_base = OTHER; note = 2'-O-Methyl-guanosine
  modified_base 28: mod_base = OTHER; note = 2'-O-Methyl-adenosine
  modified_base 29: mod_base = OTHER; note = 2'-O-Methyl-guanosine
  modified_base 30: mod_base = OTHER; note = 2'-O-Methyl-cytidine
  modified_base 31: mod_base = OTHER; note = 2'-O-Methyl-uridine
  modified_base 32: mod_base = OTHER; note = 2'-O-Methyl-adenosine
  modified_base 33: mod_base = OTHER; note = 2'-O-Methyl-guanosine
  modified_base 34: mod_base = OTHER; note = 2'-O-Methyl-adenosine
  modified_base 35: mod_base = OTHER; note = 2'-O-Methyl-adenosine
  modified_base 36: mod_base = OTHER; note = 2'-O-Methyl-adenosine
  modified_base 37: mod_base = OTHER; note = 2'-O-Methyl-uridine
  modified_base 38: mod_base = OTHER; note = 2'-O-Methyl-adenosine
  modified_base 39: mod_base = OTHER; note = 2'-O-Methyl-guanosine
  modified_base 40: mod_base = OTHER; note = 2'-O-Methyl-cytidine
  modified_base 41: mod_base = OTHER; note = 2'-O-Methyl-adenosine
  modified_base 42: mod_base = OTHER; note = 2'-O-Methyl-adenosine
  modified_base 45: mod_base = OTHER; note = uridine phosphorothioate
  modified_base 46: mod_base = OTHER; note = 2'-O-Methyl-adenosine
  modified_base 48: mod_base = OTHER; note = 2'-O-Methyl-adenosine
  modified_base 50: mod_base = OTHER; note = 2'-O-Methyl-uridine
  modified_base 52: mod_base = OTHER; note = 2'-O-Methyl-adenosine
  modified_base 53: mod_base = OTHER; note = 2'-O-Methyl-guanosine
  modified_base 54: mod_base = OTHER; note = 2'-O-Methyl-guanosine
  modified_base 55: mod_base = OTHER; note = 2'-O-Methyl-cytidine
  modified_base 56: mod_base = OTHER; note = 2'-O-Methyl-uridine
  modified_base 57: mod_base = OTHER; note = 2'-O-Methyl-adenosine
  modified_base 60: mod_base = OTHER; note = 2'-O-Methyl-cytidine
  modified_base 61: mod_base = OTHER; note = 2'-O-Methyl-cytidine
  modified_base 64: mod_base = OTHER; note = uridine phosphorothioate
  modified_base 66: mod_base = OTHER; note = 2'-O-Methyl-uridine
  modified_base 67: mod_base = OTHER; note = 2'-O-Methyl-cytidine
  modified_base 70: mod_base = OTHER; note = 2'-O-Methyl-cytidine
  modified_base 71: mod_base = OTHER; note = 2'-O-Methyl-uridine
  modified_base 72: mod_base = OTHER; note = 2'-O-Methyl-uridine
  modified_base 73: mod_base = OTHER; note = 2'-O-Methyl-guanosine
  modified_base 74: mod_base = OTHER; note = 2'-O-Methyl-adenosine
  modified_base 75: mod_base = OTHER; note = 2'-O-Methyl-adenosine
  modified_base 76: mod_base = OTHER; note = 2'-O-Methyl-adenosine
  modified_base 77: mod_base = OTHER; note = 2'-O-Methyl-adenosine
  modified_base 78: mod_base = OTHER; note = 2'-O-Methyl-adenosine
  modified_base 79: mod_base = OTHER; note = 2'-O-Methyl-guanosine
  modified_base 80: mod_base = OTHER; note = 2'-O-Methyl-uridine
  modified_base 81: mod_base = OTHER; note = 2'-O-Methyl-guanosine
  modified_base 83: mod_base = OTHER; note = 2'-O-Methyl-cytidine
  modified_base 84: mod_base = OTHER; note = 2'-O-Methyl-adenosine
  modified_base 85: mod_base = OTHER; note = 2'-O-Methyl-cytidine
  modified_base 86: mod_base = OTHER; note = 2'-O-Methyl-cytidine
  modified_base 87: mod_base = OTHER; note = 2'-O-Methyl-guanosine
  modified_base 88: mod_base = OTHER; note = 2'-O-Methyl-adenosine
  modified_base 89: mod_base = OTHER; note = 2'-O-Methyl-guanosine
  modified_base 90: mod_base = OTHER; note = 2'-O-Methyl-uridine
  modified_base 91: mod_base = OTHER; note = 2'-O-Methyl-cytidine
  modified_base 92: mod_base = OTHER; note = 2'-O-Methyl-guanosine
  modified_base 93: mod_base = OTHER; note = 2'-O-Methyl-guanosine
  modified_base 94: mod_base = OTHER; note = 2'-O-Methyl-uridine
  modified_base 95: mod_base = OTHER; note = 2'-O-Methyl-guanosine
  modified_base 96: mod_base = OTHER; note = 2'-O-Methyl-cytidine
  modified_base 97: mod_base = OTHER; note = 2'-O-Methyl-uridine
  modified_base 98: mod_base = OTHER; note = 2'-O-Methyl-uridine phosphorothioate
  modified_base 99: mod_base = OTHER; note = 2'-O-Methyl-uridine phosphorothioate
  modified_base 100: mod_base = OTHER; note = 2'-O-Methyl-uridine

SEQ ID NO: 2633 - RNA, 103 nt, synthetic construct; identical to SEQ ID NO: 1643
  source 1..103: mol_type = other RNA
  modified_base 1: mod_base = OTHER; note = 2'-O-Methyl-cytidine phosphorothioate
  modified_base 2: mod_base = OTHER; note = 2'-O-Methyl-cytidine phosphorothioate
  modified_base 3: mod_base = OTHER; note = 2'-O-Methyl-cytidine phosphorothioate
  modified_base 21: mod_base = OTHER; note = 2'-O-Methyl-guanosine
  modified_base 28: mod_base = OTHER; note = 2'-O-Methyl-adenosine
  modified_base 29: mod_base = OTHER; note = 2'-O-Methyl-guanosine
  modified_base 30: mod_base = OTHER; note = 2'-O-Methyl-cytidine
  modified_base 31: mod_base = OTHER; note = 2'-O-Methyl-uridine
  modified_base 32: mod_base = OTHER; note = 2'-O-Methyl-adenosine
  modified_base 34: mod_base = OTHER; note = 2'-O-Methyl-adenosine
  modified_base 35: mod_base = OTHER; note = 2'-O-Methyl-adenosine
  modified_base 36: mod_base = OTHER; note = 2'-O-Methyl-adenosine
  modified_base 37: mod_base = OTHER; note = 2'-O-Methyl-uridine
  modified_base 38: mod_base = OTHER; note = 2'-O-Methyl-adenosine
  modified_base 39: mod_base = OTHER; note = 2'-O-Methyl-guanosine
  modified_base 40: mod_base = OTHER; note = 2'-O-Methyl-cytidine
  modified_base 41: mod_base = OTHER; note = 2'-O-Methyl-adenosine
  modified_base 42: mod_base = OTHER; note = 2'-O-Methyl-adenosine
  modified_base 45: mod_base = OTHER; note = uridine phosphorothioate
  modified_base 46: mod_base = OTHER; note = 2'-O-Methyl-adenosine
  modified_base 48: mod_base = OTHER; note = 2'-O-Methyl-adenosine
  modified_base 50: mod_base = OTHER; note = 2'-O-Methyl-uridine
  modified_base 52: mod_base = OTHER; note = 2'-O-Methyl-adenosine
  modified_base 53: mod_base = OTHER; note = 2'-O-Methyl-guanosine
  modified_base 54: mod_base = OTHER; note = 2'-O-Methyl-guanosine
  modified_base 55: mod_base = OTHER; note = 2'-O-Methyl-cytidine
  modified_base 56: mod_base = OTHER; note = 2'-O-Methyl-uridine
  modified_base 57: mod_base = OTHER; note = 2'-O-Methyl-adenosine
  modified_base 60: mod_base = OTHER; note = 2'-O-Methyl-cytidine
  modified_base 61: mod_base = OTHER; note = 2'-O-Methyl-cytidine
  modified_base 64: mod_base = OTHER; note = uridine phosphorothioate
  modified_base 66: mod_base = OTHER; note = 2'-O-Methyl-uridine
  modified_base 67: mod_base = OTHER; note = 2'-O-Methyl-cytidine
  modified_base 70: mod_base = OTHER; note = 2'-O-Methyl-cytidine
  modified_base 71: mod_base = OTHER; note = 2'-O-Methyl-uridine
  modified_base 72: mod_base = OTHER; note = 2'-O-Methyl-uridine
  modified_base 74: mod_base = OTHER; note = 2'-O-Methyl-adenosine
  modified_base 75: mod_base = OTHER; note = 2'-O-Methyl-adenosine
  modified_base 76: mod_base = OTHER; note = 2'-O-Methyl-adenosine
  modified_base 77: mod_base = OTHER; note = 2'-O-Methyl-adenosine
  modified_base 78: mod_base = OTHER; note = 2'-O-Methyl-adenosine
  modified_base 79: mod_base = OTHER; note = 2'-O-Methyl-guanosine
  modified_base 80: mod_base = OTHER; note = 2'-O-Methyl-uridine
  modified_base 81: mod_base = OTHER; note = 2'-O-Methyl-guanosine
  modified_base 83: mod_base = OTHER; note = 2'-O-Methyl-cytidine
  modified_base 84: mod_base = OTHER; note = 2'-O-Methyl-adenosine
  modified_base 85: mod_base = OTHER; note = 2'-O-Methyl-cytidine
  modified_base 86: mod_base = OTHER; note = 2'-O-Methyl-cytidine
  modified_base 87: mod_base = OTHER; note = 2'-O-Methyl-guanosine
  modified_base 88: mod_base = OTHER; note = 2'-O-Methyl-adenosine
  modified_base 89: mod_base = OTHER; note = 2'-O-Methyl-guanosine
  modified_base 90: mod_base = OTHER; note = 2'-O-Methyl-uridine
  modified_base 91: mod_base = OTHER; note = 2'-O-Methyl-cytidine
  modified_base 92: mod_base = OTHER; note = 2'-O-Methyl-guanosine
  modified_base 93: mod_base = OTHER; note = 2'-O-Methyl-guanosine
  modified_base 94: mod_base = OTHER; note = 2'-O-Methyl-uridine
  modified_base 95: mod_base = OTHER; note = 2'-O-Methyl-guanosine
  modified_base 96: mod_base = OTHER; note = 2'-O-Methyl-cytidine
  modified_base 97: mod_base = OTHER; note = 2'-O-Methyl-uridine
  modified_base 98: mod_base = OTHER; note = 2'-O-Methyl-uridine phosphorothioate
  modified_base 99: mod_base = OTHER; note = 2'-O-Methyl-uridine phosphorothioate
  modified_base 100: mod_base = OTHER; note = 2'-O-Methyl-uridine

SEQ ID NO: 2634 - RNA, 103 nt, synthetic construct; identical to SEQ ID NO: 1699
  source 1..103: mol_type = other RNA
  modified_base 1: mod_base = OTHER; note = 2'-O-Methyl-guanosine phosphorothioate
  modified_base 2: mod_base = OTHER; note = 2'-O-Methyl-adenosine phosphorothioate
  modified_base 3: mod_base = OTHER; note = 2'-O-Methyl-guanosine phosphorothioate
  modified_base 21: mod_base = OTHER; note = 2'-O-Methyl-guanosine
  modified_base 28: mod_base = OTHER; note = 2'-O-Methyl-adenosine
  modified_base 29: mod_base = OTHER; note = 2'-O-Methyl-guanosine
  modified_base 30: mod_base = OTHER; note = 2'-O-Methyl-cytidine
  modified_base 31: mod_base = OTHER; note = 2'-O-Methyl-uridine
  modified_base 32: mod_base = OTHER; note = 2'-O-Methyl-adenosine
  modified_base 33: mod_base = OTHER; note = 2'-O-Methyl-guanosine
  modified_base 34: mod_base = OTHER; note = 2'-O-Methyl-adenosine
  modified_base 35: mod_base = OTHER; note = 2'-O-Methyl-adenosine
  modified_base 36: mod_base = OTHER; note = 2'-O-Methyl-adenosine
  modified_base 37: mod_base = OTHER; note = 2'-O-Methyl-uridine
  modified_base 38: mod_base = OTHER; note = 2'-O-Methyl-adenosine
  modified_base 39: mod_base = OTHER; note = 2'-O-Methyl-guanosine
  modified_base 40: mod_base = OTHER; note = 2'-O-Methyl-cytidine
  modified_base 41: mod_base = OTHER; note = 2'-O-Methyl-adenosine
  modified_base 42: mod_base = OTHER; note = 2'-O-Methyl-adenosine
  modified_base 45: mod_base = OTHER; note = uridine phosphorothioate
  modified_base 46: mod_base = OTHER; note = 2'-O-Methyl-adenosine
  modified_base 48: mod_base = OTHER; note = 2'-O-Methyl-adenosine
  modified_base 50: mod_base = OTHER; note = 2'-O-Methyl-uridine
  modified_base 52: mod_base = OTHER; note = 2'-O-Methyl-adenosine
  modified_base 53: mod_base = OTHER; note = 2'-O-Methyl-guanosine
  modified_base 54: mod_base = OTHER; note = 2'-O-Methyl-guanosine
  modified_base 55: mod_base = OTHER; note = 2'-O-Methyl-cytidine
  modified_base 56: mod_base = OTHER; note = 2'-O-Methyl-uridine
  modified_base 57: mod_base = OTHER; note = 2'-O-Methyl-adenosine
  modified_base 60: mod_base = OTHER; note = 2'-O-Methyl-cytidine
  modified_base 61: mod_base = OTHER; note = 2'-O-Methyl-cytidine
  modified_base 64: mod_base = OTHER; note = uridine phosphorothioate
  modified_base 66: mod_base = OTHER; note = 2'-O-Methyl-uridine
  modified_base 67: mod_base = OTHER; note = 2'-O-Methyl-cytidine
  modified_base 70: mod_base = OTHER; note = 2'-O-Methyl-cytidine
  modified_base 71: mod_base = OTHER; note = 2'-O-Methyl-uridine
  modified_base 72: mod_base = OTHER; note = 2'-O-Methyl-uridine
  modified_base 73: mod_base = OTHER; note = 2'-O-Methyl-guanosine
  modified_base 74: mod_base = OTHER; note = 2'-O-Methyl-adenosine
  modified_base 75: mod_base = OTHER; note = 2'-O-Methyl-adenosine
  modified_base 76: mod_base = OTHER; note = 2'-O-Methyl-adenosine
  modified_base 77: mod_base = OTHER; note = 2'-O-Methyl-adenosine
  modified_base 78: mod_base = OTHER; note = 2'-O-Methyl-adenosine
  modified_base 79: mod_base = OTHER; note = 2'-O-Methyl-guanosine
  modified_base 80: mod_base = OTHER; note = 2'-O-Methyl-uridine
  modified_base 81: mod_base = OTHER; note = 2'-O-Methyl-guanosine
  modified_base 83: mod_base = OTHER; note = 2'-O-Methyl-cytidine
  modified_base 84: mod_base = OTHER; note = 2'-O-Methyl-adenosine
  modified_base 85: mod_base = OTHER; note = 2'-O-Methyl-cytidine
  modified_base 86: mod_base = OTHER; note = 2'-O-Methyl-cytidine
  modified_base 87: mod_base = OTHER; note = 2'-O-Methyl-guanosine
  modified_base 88: mod_base = OTHER; note = 2'-O-Methyl-adenosine
  modified_base 89: mod_base = OTHER; note = 2'-O-Methyl-guanosine
  modified_base 90: mod_base = OTHER; note = 2'-O-Methyl-uridine
  modified_base 91: mod_base = OTHER; note = 2'-O-Methyl-cytidine
  modified_base 92: mod_base = OTHER; note = 2'-O-Methyl-guanosine
  modified_base 93: mod_base = OTHER; note = 2'-O-Methyl-guanosine
  modified_base 94: mod_base = OTHER; note = 2'-O-Methyl-uridine
  modified_base 95: mod_base = OTHER; note = 2'-O-Methyl-guanosine
  modified_base 96: mod_base = OTHER; note = 2'-O-Methyl-cytidine
  modified_base 97: mod_base = OTHER; note = 2'-O-Methyl-uridine
  modified_base 98: mod_base = OTHER; note = 2'-O-Methyl-uridine phosphorothioate
  modified_base 99: mod_base = OTHER; note = 2'-O-Methyl-uridine phosphorothioate
  modified_base 100: mod_base = OTHER; note = 2'-O-Methyl-uridine

SEQ ID NO: 2635 - RNA, 103 nt, synthetic construct; identical to SEQ ID NO: 1699
  source 1..103: mol_type = other RNA
  modified_base 1: mod_base = OTHER; note = 2'-O-Methyl-guanosine phosphorothioate
  modified_base 2: mod_base = OTHER; note = 2'-O-Methyl-adenosine phosphorothioate
  modified_base 3: mod_base = OTHER; note = 2'-O-Methyl-guanosine phosphorothioate
  modified_base 21: mod_base = OTHER; note = 2'-O-Methyl-guanosine
  modified_base 28: mod_base = OTHER; note = 2'-O-Methyl-adenosine
  modified_base 29: mod_base = OTHER; note = 2'-O-Methyl-guanosine
  modified_base 30: mod_base = OTHER; note = 2'-O-Methyl-cytidine
  modified_base 31: mod_base = OTHER; note = 2'-O-Methyl-uridine
  modified_base 32: mod_base = OTHER; note = 2'-O-Methyl-adenosine
  modified_base 34: mod_base = OTHER; note = 2'-O-Methyl-adenosine
  modified_base 35: mod_base = OTHER; note = 2'-O-Methyl-adenosine
  modified_base 36: mod_base = OTHER; note = 2'-O-Methyl-adenosine
  modified_base 37: mod_base = OTHER; note = 2'-O-Methyl-uridine
  modified_base 38: mod_base = OTHER; note = 2'-O-Methyl-adenosine
  modified_base 39: mod_base = OTHER; note = 2'-O-Methyl-guanosine
  modified_base 40: mod_base = OTHER; note = 2'-O-Methyl-cytidine
  modified_base 41: mod_base = OTHER; note = 2'-O-Methyl-adenosine
  modified_base 42: mod_base = OTHER; note = 2'-O-Methyl-adenosine
  modified_base 45: mod_base = OTHER; note = uridine phosphorothioate
  modified_base 46: mod_base = OTHER; note = 2'-O-Methyl-adenosine
  modified_base 48: mod_base = OTHER; note = 2'-O-Methyl-adenosine
  modified_base 50: mod_base = OTHER; note = 2'-O-Methyl-uridine
  modified_base 52: mod_base = OTHER; note = 2'-O-Methyl-adenosine
  modified_base 53: mod_base = OTHER; note = 2'-O-Methyl-guanosine
  modified_base 54: mod_base = OTHER; note = 2'-O-Methyl-guanosine
  modified_base 55: mod_base = OTHER; note = 2'-O-Methyl-cytidine
  modified_base 56: mod_base = OTHER; note = 2'-O-Methyl-uridine
  modified_base 57: mod_base = OTHER; note = 2'-O-Methyl-adenosine
  modified_base 60: mod_base = OTHER; note = 2'-O-Methyl-cytidine
  modified_base 61: mod_base = OTHER; note = 2'-O-Methyl-cytidine
  modified_base 64: mod_base = OTHER; note = uridine phosphorothioate
  modified_base 66: mod_base = OTHER; note = 2'-O-Methyl-uridine
  modified_base 67: mod_base = OTHER; note = 2'-O-Methyl-cytidine
  modified_base 70: mod_base = OTHER; note = 2'-O-Methyl-cytidine
  modified_base 71: mod_base = OTHER; note = 2'-O-Methyl-uridine
  modified_base 72: mod_base = OTHER; note = 2'-O-Methyl-uridine
  modified_base 74: mod_base = OTHER; note = 2'-O-Methyl-adenosine
  modified_base 75: mod_base = OTHER; note = 2'-O-Methyl-adenosine
  modified_base 76: mod_base = OTHER; note = 2'-O-Methyl-adenosine
  modified_base 77: mod_base = OTHER; note = 2'-O-Methyl-adenosine
  modified_base 78: mod_base = OTHER; note = 2'-O-Methyl-adenosine
  modified_base 79: mod_base = OTHER; note = 2'-O-Methyl-guanosine
  modified_base 80: mod_base = OTHER; note = 2'-O-Methyl-uridine
  modified_base 81: mod_base = OTHER; note = 2'-O-Methyl-guanosine
  modified_base 83: mod_base = OTHER; note = 2'-O-Methyl-cytidine
  modified_base 84: mod_base = OTHER; note = 2'-O-Methyl-adenosine
  modified_base 85: mod_base = OTHER; note = 2'-O-Methyl-cytidine
  modified_base 86: mod_base = OTHER; note = 2'-O-Methyl-cytidine
  modified_base 87: mod_base = OTHER; note = 2'-O-Methyl-guanosine
  modified_base 88: mod_base = OTHER; note = 2'-O-Methyl-adenosine
  modified_base 89: mod_base = OTHER; note = 2'-O-Methyl-guanosine
  modified_base 90: mod_base = OTHER; note = 2'-O-Methyl-uridine
  modified_base 91: mod_base = OTHER; note = 2'-O-Methyl-cytidine
  modified_base 92: mod_base = OTHER; note = 2'-O-Methyl-guanosine
  modified_base 93: mod_base = OTHER; note = 2'-O-Methyl-guanosine
  modified_base 94: mod_base = OTHER; note = 2'-O-Methyl-uridine
  modified_base 95: mod_base = OTHER; note = 2'-O-Methyl-guanosine
  modified_base 96: mod_base = OTHER; note = 2'-O-Methyl-cytidine
  modified_base 97: mod_base = OTHER; note = 2'-O-Methyl-uridine
  modified_base 98: mod_base = OTHER; note = 2'-O-Methyl-uridine phosphorothioate
  modified_base 99: mod_base = OTHER; note = 2'-O-Methyl-uridine phosphorothioate
  modified_base 100: mod_base = OTHER; note = 2'-O-Methyl-uridine

SEQ ID NO: 2636 - RNA, 103 nt, synthetic construct; identical to SEQ ID NO: 1700
  source 1..103: mol_type = other RNA
  modified_base 1: mod_base = OTHER; note = 2'-O-Methyl-cytidine phosphorothioate
  modified_base 2: mod_base = OTHER; note = 2'-O-Methyl-adenosine phosphorothioate
  modified_base 3: mod_base = OTHER; note = 2'-O-Methyl-guanosine phosphorothioate
  modified_base 21: mod_base = OTHER; note = 2'-O-Methyl-guanosine
  modified_base 28: mod_base = OTHER; note = 2'-O-Methyl-adenosine
  modified_base 29: mod_base = OTHER; note = 2'-O-Methyl-guanosine
  modified_base 30: mod_base = OTHER; note = 2'-O-Methyl-cytidine
  modified_base 31: mod_base = OTHER; note = 2'-O-Methyl-uridine
  modified_base 32: mod_base = OTHER; note = 2'-O-Methyl-adenosine
  modified_base 33: mod_base = OTHER; note = 2'-O-Methyl-guanosine
  modified_base 34: mod_base = OTHER; note = 2'-O-Methyl-adenosine
  modified_base 35: mod_base = OTHER; note = 2'-O-Methyl-adenosine
  modified_base 36: mod_base = OTHER; note = 2'-O-Methyl-adenosine
  modified_base 37: mod_base = OTHER; note = 2'-O-Methyl-uridine
  modified_base 38: mod_base = OTHER; note = 2'-O-Methyl-adenosine
  modified_base 39: mod_base = OTHER; note = 2'-O-Methyl-guanosine
  modified_base 40: mod_base = OTHER; note = 2'-O-Methyl-cytidine
  modified_base 41: mod_base = OTHER; note = 2'-O-Methyl-adenosine
  modified_base 42: mod_base = OTHER; note = 2'-O-Methyl-adenosine
  modified_base 45: mod_base = OTHER; note = uridine phosphorothioate
  modified_base 46: mod_base = OTHER; note = 2'-O-Methyl-adenosine
  modified_base 48: mod_base = OTHER; note = 2'-O-Methyl-adenosine
  modified_base 50: mod_base = OTHER; note = 2'-O-Methyl-uridine
  modified_base 52: mod_base = OTHER; note = 2'-O-Methyl-adenosine
  modified_base 53: mod_base = OTHER; note = 2'-O-Methyl-guanosine
  modified_base 54: mod_base = OTHER; note = 2'-O-Methyl-guanosine
  modified_base 57: mod_base = OTHER; note = 2'-O-Methyl-adenosine
  modified_base 61: mod_base = OTHER; note = 2'-O-Methyl-cytidine
  modified_base 64: mod_base = OTHER; note = uridine phosphorothioate
  modified_base 66: mod_base = OTHER; note = 2'-O-Methyl-uridine
  modified_base 67: mod_base = OTHER; note = 2'-O-Methyl-cytidine
  modified_base 70: mod_base = OTHER; note = 2'-O-Methyl-cytidine
  modified_base 71: mod_base = OTHER; note = 2'-O-Methyl-uridine
  modified_base 72: mod_base = OTHER; note = 2'-O-Methyl-uridine
  modified_base 74: mod_base = OTHER; note = 2'-O-Methyl-adenosine
  modified_base 75: mod_base = OTHER; note = 2'-O-Methyl-adenosine
  modified_base 76: mod_base = OTHER; note = 2'-O-Methyl-adenosine
  modified_base 77: mod_base = OTHER; note = 2'-O-Methyl-adenosine
  modified_base 78: mod_base = OTHER; note = 2'-O-Methyl-adenosine
  modified_base 79: mod_base = OTHER; note = 2'-O-Methyl-guanosine
  modified_base 80: mod_base = OTHER; note = 2'-O-Methyl-uridine
  modified_base 82: mod_base = OTHER; note = 2'-O-Methyl-guanosine
  modified_base 83: mod_base = OTHER; note = 2'-O-Methyl-cytidine
  modified_base 84: mod_base = OTHER; note = 2'-O-Methyl-adenosine
  modified_base 85: mod_base = OTHER; note = 2'-O-Methyl-cytidine
  modified_base 86: mod_base = OTHER; note = 2'-O-Methyl-cytidine
  modified_base 87: mod_base = OTHER; note = 2'-O-Methyl-guanosine
  modified_base 89: mod_base = OTHER; note = 2'-O-Methyl-guanosine
  modified_base 92: mod_base = OTHER; note = 2'-O-Methyl-guanosine
  modified_base 93: mod_base = OTHER; note = 2'-O-Methyl-guanosine
  modified_base 94: mod_base = OTHER; note = 2'-O-Methyl-uridine
  modified_base 95: mod_base = OTHER; note = 2'-O-Methyl-guanosine
  modified_base 96: mod_base = OTHER; note = 2'-O-Methyl-cytidine
  modified_base 97: mod_base = OTHER; note = 2'-O-Methyl-uridine
  modified_base 98: mod_base = OTHER; note = 2'-O-Methyl-uridine phosphorothioate
  modified_base 99: mod_base = OTHER; note = 2'-O-Methyl-uridine phosphorothioate
  modified_base 100: mod_base = OTHER; note = 2'-O-Methyl-uridine

SEQ ID NO: 2637 - RNA, 103 nt, synthetic construct; identical to SEQ ID NO: 1700
  source 1..103: mol_type = other RNA
  modified_base 1: mod_base = OTHER; note = 2'-O-Methyl-cytidine phosphorothioate
  modified_base 2: mod_base = OTHER; note = 2'-O-Methyl-adenosine phosphorothioate
  modified_base 3: mod_base = OTHER; note = 2'-O-Methyl-guanosine phosphorothioate
  modified_base 21: mod_base = OTHER; note = 2'-O-Methyl-guanosine
  modified_base 28: mod_base = OTHER; note = 2'-O-Methyl-adenosine
  modified_base 29: mod_base = OTHER; note = 2'-O-Methyl-guanosine
  modified_base 30: mod_base = OTHER; note = 2'-O-Methyl-cytidine
  modified_base 31: mod_base = OTHER; note = 2'-O-Methyl-uridine
  modified_base 32: mod_base = OTHER; note = 2'-O-Methyl-adenosine
  modified_base 33: mod_base = OTHER; note = 2'-O-Methyl-guanosine
  modified_base 34: mod_base = OTHER; note = 2'-O-Methyl-adenosine
  modified_base 35: mod_base = OTHER; note = 2'-O-Methyl-adenosine
  modified_base 36: mod_base = OTHER; note = 2'-O-Methyl-adenosine
  modified_base 37: mod_base = OTHER; note = 2'-O-Methyl-uridine
  modified_base 38: mod_base = OTHER; note = 2'-O-Methyl-adenosine
  modified_base 39: mod_base = OTHER; note = 2'-O-Methyl-guanosine
  modified_base 40: mod_base = OTHER; note = 2'-O-Methyl-cytidine
  modified_base 41: mod_base = OTHER; note = 2'-O-Methyl-adenosine
  modified_base 42: mod_base = OTHER; note = 2'-O-Methyl-adenosine
  modified_base 45: mod_base = OTHER; note = uridine phosphorothioate
  modified_base 46: mod_base = OTHER; note = 2'-O-Methyl-adenosine
  modified_base 48: mod_base = OTHER; note = 2'-O-Methyl-adenosine
  modified_base 50: mod_base = OTHER; note = 2'-O-Methyl-uridine
  modified_base 52: mod_base = OTHER; note = 2'-O-Methyl-adenosine
  modified_base 53: mod_base = OTHER; note = 2'-O-Methyl-guanosine
  modified_base 54: mod_base = OTHER; note = 2'-O-Methyl-guanosine
  modified_base 55: mod_base = OTHER; note = 2'-O-Methyl-cytidine
  modified_base 56: mod_base = OTHER; note = 2'-O-Methyl-uridine
  modified_base 57: mod_base = OTHER; note = 2'-O-Methyl-adenosine
  modified_base 60: mod_base = OTHER; note = 2'-O-Methyl-cytidine
  modified_base 61: mod_base = OTHER; note = 2'-O-Methyl-cytidine
  modified_base 64: mod_base = OTHER; note = uridine phosphorothioate
  modified_base 66: mod_base = OTHER; note = 2'-O-Methyl-uridine
  modified_base 67: mod_base = OTHER; note = 2'-O-Methyl-cytidine
  modified_base 70: mod_base = OTHER; note = 2'-O-Methyl-cytidine
  modified_base 71: mod_base = OTHER; note = 2'-O-Methyl-uridine
  modified_base 72: mod_base = OTHER; note = 2'-O-Methyl-uridine
  modified_base 74: mod_base = OTHER; note = 2'-O-Methyl-adenosine
  modified_base 75: mod_base = OTHER; note = 2'-O-Methyl-adenosine
  modified_base 76: mod_base = OTHER; note = 2'-O-Methyl-adenosine
  modified_base 77: mod_base = OTHER; note = 2'-O-Methyl-adenosine
  modified_base 78: mod_base = OTHER; note = 2'-O-Methyl-adenosine
  modified_base 79: mod_base = OTHER; note = 2'-O-Methyl-guanosine
  modified_base 80: mod_base = OTHER; note = 2'-O-Methyl-uridine
  modified_base 82: mod_base = OTHER; note = 2'-O-Methyl-guanosine
  modified_base 83: mod_base = OTHER; note = 2'-O-Methyl-cytidine
  modified_base 84: mod_base = OTHER; note = 2'-O-Methyl-adenosine
  modified_base 85: mod_base = OTHER; note = 2'-O-Methyl-cytidine
  modified_base 86: mod_base = OTHER; note = 2'-O-Methyl-cytidine
  modified_base 87: mod_base = OTHER; note = 2'-O-Methyl-guanosine
  modified_base 89: mod_base = OTHER; note = 2'-O-Methyl-guanosine
  modified_base 92: mod_base = OTHER; note = 2'-O-Methyl-guanosine
  modified_base 93: mod_base = OTHER; note = 2'-O-Methyl-guanosine
  modified_base 94: mod_base = OTHER; note = 2'-O-Methyl-uridine
  modified_base 95: mod_base = OTHER; note = 2'-O-Methyl-guanosine
  modified_base 96: mod_base = OTHER; note = 2'-O-Methyl-cytidine
  modified_base 97: mod_base = OTHER; note = 2'-O-Methyl-uridine
  modified_base 98: mod_base = OTHER; note = 2'-O-Methyl-uridine phosphorothioate
  modified_base 99: mod_base = OTHER; note = 2'-O-Methyl-uridine phosphorothioate
  modified_base 100: mod_base = OTHER; note = 2'-O-Methyl-uridine

SEQ ID NO: 2638 - RNA, 103 nt, synthetic construct; identical to SEQ ID NO: 1700
  source 1..103: mol_type = other RNA
  modified_base 1: mod_base = OTHER; note = 2'-O-Methyl-cytidine phosphorothioate
  modified_base 2: mod_base = OTHER; note = 2'-O-Methyl-adenosine phosphorothioate
  modified_base 3: mod_base = OTHER; note = 2'-O-Methyl-guanosine phosphorothioate
  modified_base 21: mod_base = OTHER; note = 2'-O-Methyl-guanosine
  modified_base 28: mod_base = OTHER; note = 2'-O-Methyl-adenosine
  modified_base 29: mod_base = OTHER; note = 2'-O-Methyl-guanosine
  modified_base 30: mod_base = OTHER; note = 2'-O-Methyl-cytidine
  modified_base 31: mod_base = OTHER; note = 2'-O-Methyl-uridine
  modified_base 32: mod_base = OTHER; note = 2'-O-Methyl-adenosine
  modified_base 33: mod_base = OTHER; note = 2'-O-Methyl-guanosine
  modified_base 34: mod_base = OTHER; note = 2'-O-Methyl-adenosine
  modified_base 35: mod_base = OTHER; note = 2'-O-Methyl-adenosine
  modified_base 36: mod_base = OTHER; note = 2'-O-Methyl-adenosine
  modified_base 37: mod_base = OTHER; note = 2'-O-Methyl-uridine
  modified_base 38: mod_base = OTHER; note = 2'-O-Methyl-adenosine
  modified_base 39: mod_base = OTHER; note = 2'-O-Methyl-guanosine
  modified_base 40: mod_base = OTHER; note = 2'-O-Methyl-cytidine
  modified_base 41: mod_base = OTHER; note = 2'-O-Methyl-adenosine
  modified_base 42: mod_base = OTHER; note = 2'-O-Methyl-adenosine
  modified_base 45: mod_base = OTHER; note = uridine phosphorothioate
  modified_base 46: mod_base = OTHER; note = 2'-O-Methyl-adenosine
  modified_base 48: mod_base = OTHER; note = 2'-O-Methyl-adenosine
  modified_base 50: mod_base = OTHER; note = 2'-O-Methyl-uridine
  modified_base 52: mod_base = OTHER; note = 2'-O-Methyl-adenosine
  modified_base 53: mod_base = OTHER; note = 2'-O-Methyl-guanosine
  modified_base 54: mod_base = OTHER; note = 2'-O-Methyl-guanosine
  modified_base 57: mod_base = OTHER; note = 2'-O-Methyl-adenosine
  modified_base 61: mod_base = OTHER; note = 2'-O-Methyl-cytidine
  modified_base 64: mod_base = OTHER; note = uridine phosphorothioate
  modified_base 66: mod_base = OTHER; note = 2'-O-Methyl-uridine
  modified_base 67: mod_base = OTHER; note = 2'-O-Methyl-cytidine
  modified_base 70: mod_base = OTHER; note = 2'-O-Methyl-cytidine
  modified_base 71: mod_base = OTHER; note = 2'-O-Methyl-uridine
  modified_base 72: mod_base = OTHER; note = 2'-O-Methyl-uridine
  modified_base 73: mod_base = OTHER; note = 2'-O-Methyl-guanosine
  modified_base 74: mod_base = OTHER; note = 2'-O-Methyl-adenosine
  modified_base 75: mod_base = OTHER; note = 2'-O-Methyl-adenosine
  modified_base 76: mod_base = OTHER; note = 2'-O-Methyl-adenosine
  modified_base 77: mod_base = OTHER; note = 2'-O-Methyl-adenosine
  modified_base 78: mod_base = OTHER; note = 2'-O-Methyl-adenosine
  modified_base 79: mod_base = OTHER; note = 2'-O-Methyl-guanosine
  modified_base 80: mod_base = OTHER; note = 2'-O-Methyl-uridine
  modified_base 82: mod_base = OTHER; note = 2'-O-Methyl-guanosine
  modified_base 83: mod_base = OTHER; note = 2'-O-Methyl-cytidine
  modified_base 84: mod_base = OTHER; note = 2'-O-Methyl-adenosine
  modified_base 85: mod_base = OTHER; note = 2'-O-Methyl-cytidine
  modified_base 86: mod_base = OTHER; note = 2'-O-Methyl-cytidine
  modified_base 87: mod_base = OTHER; note = 2'-O-Methyl-guanosine
  modified_base 89: mod_base = OTHER; note = 2'-O-Methyl-guanosine
  modified_base 92: mod_base = OTHER; note = 2'-O-Methyl-guanosine
  modified_base 93: mod_base = OTHER; note = 2'-O-Methyl-guanosine
  modified_base 94: mod_base = OTHER; note = 2'-O-Methyl-uridine
  modified_base 95: mod_base = OTHER; note = 2'-O-Methyl-guanosine
  modified_base 96: mod_base = OTHER; note = 2'-O-Methyl-cytidine
  modified_base 97: mod_base = OTHER; note = 2'-O-Methyl-uridine
  modified_base 98: mod_base = OTHER; note = 2'-O-Methyl-uridine phosphorothioate
  modified_base 99: mod_base = OTHER; note = 2'-O-Methyl-uridine phosphorothioate
  modified_base 100: mod_base = OTHER; note = 2'-O-Methyl-uridine

SEQ ID NO: 2639 - RNA, 103 nt, synthetic construct; identical to SEQ ID NO: 1700
  source 1..103: mol_type = other RNA
  modified_base 1: mod_base = OTHER; note = 2'-O-Methyl-cytidine phosphorothioate
  modified_base 2: mod_base = OTHER; note = 2'-O-Methyl-adenosine phosphorothioate
  modified_base 3: mod_base = OTHER; note = 2'-O-Methyl-guanosine phosphorothioate
  modified_base 21: mod_base = OTHER; note = 2'-O-Methyl-guanosine
  modified_base 28: mod_base = OTHER; note = 2'-O-Methyl-adenosine
  modified_base 29: mod_base = OTHER; note = 2'-O-Methyl-guanosine
  modified_base 30: mod_base = OTHER; note = 2'-O-Methyl-cytidine
  modified_base 31: mod_base = OTHER; note = 2'-O-Methyl-uridine
  modified_base 32: mod_base = OTHER; note = 2'-O-Methyl-adenosine
  modified_base 34: mod_base = OTHER; note = 2'-O-Methyl-adenosine
  modified_base 35: mod_base = OTHER; note = 2'-O-Methyl-adenosine
  modified_base 36: mod_base = OTHER; note = 2'-O-Methyl-adenosine
  modified_base 37: mod_base = OTHER; note = 2'-O-Methyl-uridine
  modified_base 38: mod_base = OTHER; note = 2'-O-Methyl-adenosine
  modified_base 39: mod_base = OTHER; note = 2'-O-Methyl-guanosine
  modified_base 40: mod_base = OTHER; note = 2'-O-Methyl-cytidine
  modified_base 41: mod_base = OTHER; note = 2'-O-Methyl-adenosine
  modified_base 42: mod_base = OTHER; note = 2'-O-Methyl-adenosine
  modified_base 45: mod_base = OTHER; note = uridine phosphorothioate
  modified_base 46: mod_base = OTHER; note = 2'-O-Methyl-adenosine
  modified_base 48: mod_base = OTHER; note = 2'-O-Methyl-adenosine
  modified_base 50: mod_base = OTHER; note = 2'-O-Methyl-uridine
  modified_base 52: mod_base = OTHER; note = 2'-O-Methyl-adenosine
  modified_base 53: mod_base = OTHER; note = 2'-O-Methyl-guanosine
  modified_base 54: mod_base = OTHER; note = 2'-O-Methyl-guanosine
  modified_base 57: mod_base = OTHER; note = 2'-O-Methyl-adenosine
  modified_base 61: mod_base = OTHER; note = 2'-O-Methyl-cytidine
  modified_base 64: mod_base = OTHER; note = uridine phosphorothioate
  modified_base 66: mod_base = OTHER; note = 2'-O-Methyl-uridine
  modified_base 67: mod_base = OTHER; note = 2'-O-Methyl-cytidine
  modified_base 70: mod_base = OTHER; note = 2'-O-Methyl-cytidine
  modified_base 71: mod_base = OTHER; note = 2'-O-Methyl-uridine
  modified_base 72: mod_base = OTHER; note = 2'-O-Methyl-uridine
  modified_base 73: mod_base = OTHER; note = 2'-O-Methyl-guanosine
  modified_base 74: mod_base = OTHER; note = 2'-O-Methyl-adenosine
  modified_base 75: mod_base = OTHER; note = 2'-O-Methyl-adenosine
  modified_base 76: mod_base = OTHER; note = 2'-O-Methyl-adenosine
  modified_base 77: mod_base = OTHER; note = 2'-O-Methyl-adenosine
  modified_base 78: mod_base = OTHER; note = 2'-O-Methyl-adenosine
  modified_base 79: mod_base = OTHER; note = 2'-O-Methyl-guanosine
  modified_base 80: mod_base = OTHER; note = 2'-O-Methyl-uridine
  modified_base 82: mod_base = OTHER; note = 2'-O-Methyl-guanosine
  modified_base 83: mod_base = OTHER; note = 2'-O-Methyl-cytidine
  modified_base 84: mod_base = OTHER; note = 2'-O-Methyl-adenosine
  modified_base 85: mod_base = OTHER; note = 2'-O-Methyl-cytidine
  modified_base 86: mod_base = OTHER; note = 2'-O-Methyl-cytidine
  modified_base 87: mod_base = OTHER; note = 2'-O-Methyl-guanosine
  modified_base 89: mod_base = OTHER; note = 2'-O-Methyl-guanosine
  modified_base 91: mod_base = OTHER; note = 2'-O-Methyl-cytidine
  modified_base 92: mod_base = OTHER; note = 2'-O-Methyl-guanosine
  modified_base 93: mod_base = OTHER; note = 2'-O-Methyl-guanosine
  modified_base 94: mod_base = OTHER; note = 2'-O-Methyl-uridine
  modified_base 95: mod_base = OTHER; note = 2'-O-Methyl-guanosine
  modified_base 96: mod_base = OTHER; note = 2'-O-Methyl-cytidine
  modified_base 97: mod_base = OTHER; note = 2'-O-Methyl-uridine
  modified_base 98: mod_base = OTHER; note = 2'-O-Methyl-uridine phosphorothioate
  modified_base 99: mod_base = OTHER; note = 2'-O-Methyl-uridine phosphorothioate
  modified_base 100: mod_base = OTHER; note = 2'-O-Methyl-uridine

SEQ ID NO: 2640 - RNA, 103 nt, synthetic construct; identical to SEQ ID NO: 1700
  source 1..103: mol_type = other RNA
  modified_base 1: mod_base = OTHER; note = 2'-O-Methyl-cytidine phosphorothioate
  modified_base 2: mod_base = OTHER; note = 2'-O-Methyl-adenosine phosphorothioate
  modified_base 3: mod_base = OTHER; note = 2'-O-Methyl-guanosine phosphorothioate
  modified_base 21: mod_base = OTHER; note = 2'-O-Methyl-guanosine
  modified_base 28: mod_base = OTHER; note = 2'-O-Methyl-adenosine
  modified_base 29: mod_base = OTHER; note = 2'-O-Methyl-guanosine
  modified_base 30: mod_base = OTHER; note = 2'-O-Methyl-cytidine
  modified_base 31: mod_base = OTHER; note = 2'-O-Methyl-uridine
  modified_base 32: mod_base = OTHER; note = 2'-O-Methyl-adenosine
  modified_base 34: mod_base = OTHER; note = 2'-O-Methyl-adenosine
  modified_base 35: mod_base = OTHER; note = 2'-O-Methyl-adenosine
  modified_base 36: mod_base = OTHER; note = 2'-O-Methyl-adenosine
  modified_base 37: mod_base = OTHER; note = 2'-O-Methyl-uridine
  modified_base 38: mod_base = OTHER; note = 2'-O-Methyl-adenosine
  modified_base 39: mod_base = OTHER; note = 2'-O-Methyl-guanosine
  modified_base 40: mod_base = OTHER; note = 2'-O-Methyl-cytidine
  modified_base 41: mod_base = OTHER; note = 2'-O-Methyl-adenosine
  modified_base 42: mod_base = OTHER; note = 2'-O-Methyl-adenosine
  modified_base 45: mod_base = OTHER; note = uridine phosphorothioate
  modified_base 46: mod_base = OTHER; note = 2'-O-Methyl-adenosine
  modified_base 48: mod_base = OTHER; note = 2'-O-Methyl-adenosine
  modified_base 50: mod_base = OTHER; note = 2'-O-Methyl-uridine
  modified_base 52: mod_base = OTHER; note = 2'-O-Methyl-adenosine
  modified_base 53: mod_base = OTHER; note = 2'-O-Methyl-guanosine
  modified_base 54: mod_base = OTHER; note = 2'-O-Methyl-guanosine
  modified_base 55: mod_base = OTHER; note = 2'-O-Methyl-cytidine
  modified_base 56: mod_base = OTHER; note = 2'-O-Methyl-uridine
  modified_base 57: mod_base = OTHER; note = 2'-O-Methyl-adenosine
  modified_base 60: mod_base = OTHER; note = 2'-O-Methyl-cytidine
  modified_base 61: mod_base = OTHER; note = 2'-O-Methyl-cytidine
  modified_base 64: mod_base = OTHER; note = uridine phosphorothioate
  modified_base 66: mod_base = OTHER; note = 2'-O-Methyl-uridine
  modified_base 67: mod_base = OTHER; note = 2'-O-Methyl-cytidine
  modified_base 70: mod_base = OTHER; note = 2'-O-Methyl-cytidine
  modified_base 71: mod_base = OTHER; note = 2'-O-Methyl-uridine
  modified_base 72: mod_base = OTHER; note = 2'-O-Methyl-uridine
  modified_base 74: mod_base = OTHER; note = 2'-O-Methyl-adenosine
  modified_base 75: mod_base = OTHER; note = 2'-O-Methyl-adenosine
  modified_base 76: mod_base = OTHER; note = 2'-O-Methyl-adenosine
  modified_base 77: mod_base = OTHER; note = 2'-O-Methyl-adenosine
  modified_base 78: mod_base = OTHER; note = 2'-O-Methyl-adenosine
  modified_base 79: mod_base = OTHER; note = 2'-O-Methyl-guanosine
  modified_base 80: mod_base = OTHER; note = 2'-O-Methyl-uridine
  modified_base 82: mod_base = OTHER; note = 2'-O-Methyl-guanosine
  modified_base 83: mod_base = OTHER; note = 2'-O-Methyl-cytidine
  modified_base 84: mod_base = OTHER; note = 2'-O-Methyl-adenosine
  modified_base 85: mod_base = OTHER; note = 2'-O-Methyl-cytidine
  modified_base 86: mod_base = OTHER; note = 2'-O-Methyl-cytidine
  modified_base 87: mod_base = OTHER; note = 2'-O-Methyl-guanosine
  modified_base 89: mod_base = OTHER; note = 2'-O-Methyl-guanosine
  modified_base 92: mod_base = OTHER; note = 2'-O-Methyl-guanosine
  modified_base 93: mod_base = OTHER; note = 2'-O-Methyl-guanosine
  modified_base 94: mod_base = OTHER; note = 2'-O-Methyl-uridine
  modified_base 95: mod_base = OTHER; note = 2'-O-Methyl-guanosine
  modified_base 96: mod_base = OTHER; note = 2'-O-Methyl-cytidine
  modified_base 97: mod_base = OTHER; note = 2'-O-Methyl-uridine
  modified_base 98: mod_base = OTHER; note = 2'-O-Methyl-uridine phosphorothioate
  modified_base 99: mod_base = OTHER; note = 2'-O-Methyl-uridine phosphorothioate
  modified_base 100: mod_base = OTHER; note = 2'-O-Methyl-uridine

SEQ ID NO: 2641 - RNA, 103 nt, synthetic construct; identical to SEQ ID NO: 1643
  source 1..103: mol_type = other RNA
  modified_base 1: mod_base = OTHER; note = 2'-O-Methyl-cytidine phosphorothioate
  modified_base 2: mod_base = OTHER; note = 2'-O-Methyl-cytidine phosphorothioate
  modified_base 3: mod_base = OTHER; note = 2'-O-Methyl-cytidine phosphorothioate
  modified_base 21: mod_base = OTHER; note = 2'-O-Methyl-guanosine
  modified_base 25: mod_base = OTHER; note = uridine phosphorothioate
  modified_base 28: mod_base = OTHER; note = 2'-O-Methyl-adenosine
  modified_base 29: mod_base = OTHER; note = 2'-O-Methyl-guanosine
  modified_base 30: mod_base = OTHER; note = 2'-O-Methyl-cytidine
  modified_base 31: mod_base = OTHER; note = 2'-O-Methyl-uridine
  modified_base 32: mod_base = OTHER; note = 2'-O-Methyl-adenosine
  modified_base 33: mod_base = OTHER; note = 2'-O-Methyl-guanosine
  modified_base 34: mod_base = OTHER; note = 2'-O-Methyl-adenosine
  modified_base 35: mod_base = OTHER; note = 2'-O-Methyl-adenosine
  modified_base 36: mod_base = OTHER; note = 2'-O-Methyl-adenosine
  modified_base 37: mod_base = OTHER; note = 2'-O-Methyl-uridine
  modified_base 38: mod_base = OTHER; note = 2'-O-Methyl-adenosine
  modified_base 39: mod_base = OTHER; note = 2'-O-Methyl-guanosine
  modified_base 40: mod_base = OTHER; note = 2'-O-Methyl-cytidine
  modified_base 41: mod_base = OTHER; note = 2'-O-Methyl-adenosine
  modified_base 42: mod_base = OTHER; note = 2'-O-Methyl-adenosine
  modified_base 45: mod_base = OTHER; note = uridine phosphorothioate
  modified_base 46: mod_base = OTHER; note = 2'-O-Methyl-adenosine
  modified_base 48: mod_base = OTHER; note = 2'-O-Methyl-adenosine
  modified_base 50: mod_base = OTHER; note = 2'-O-Methyl-uridine
  modified_base 52: mod_base = OTHER; note = 2'-O-Methyl-adenosine
  modified_base 53: mod_base = OTHER; note = 2'-O-Methyl-guanosine
  modified_base 54: mod_base = OTHER; note = 2'-O-Methyl-guanosine
  modified_base 55: mod_base = OTHER; note = 2'-O-Methyl-cytidine
  modified_base 56: mod_base = OTHER; note = 2'-O-Methyl-uridine
  modified_base 57: mod_base = OTHER; note = 2'-O-Methyl-adenosine
  modified_base 60: mod_base = OTHER; note = 2'-O-Methyl-cytidine
  modified_base 61: mod_base = OTHER; note = 2'-O-Methyl-cytidine
  modified_base 66: mod_base = OTHER; note = 2'-O-Methyl-uridine
  modified_base 67: mod_base = OTHER; note = 2'-O-Methyl-cytidine
  modified_base 70: mod_base = OTHER; note = 2'-O-Methyl-cytidine
  modified_base 71: mod_base = OTHER; note = 2'-O-Methyl-uridine
  modified_base 72: mod_base = OTHER; note = 2'-O-Methyl-uridine
  modified_base 73: mod_base = OTHER; note = 2'-O-Methyl-guanosine
  modified_base 74: mod_base = OTHER; note = 2'-O-Methyl-adenosine
  modified_base 75: mod_base = OTHER; note = 2'-O-Methyl-adenosine
  modified_base 76: mod_base = OTHER; note = 2'-O-Methyl-adenosine
  modified_base 77: mod_base = OTHER; note = 2'-O-Methyl-adenosine
  modified_base 78: mod_base = OTHER; note = 2'-O-Methyl-adenosine
  modified_base 79: mod_base = OTHER; note = 2'-O-Methyl-guanosine
  modified_base 80: mod_base = OTHER; note = 2'-O-Methyl-uridine
  modified_base 81: mod_base = OTHER; note = 2'-O-Methyl-guanosine
  modified_base 83: mod_base = OTHER; note = 2'-O-Methyl-cytidine
  modified_base 84: mod_base = OTHER; note = 2'-O-Methyl-adenosine
  modified_base 85: mod_base = OTHER; note = 2'-O-Methyl-cytidine
  modified_base 86: mod_base = OTHER; note = 2'-O-Methyl-cytidine
  modified_base 87: mod_base = OTHER; note = 2'-O-Methyl-guanosine
  modified_base 88: mod_base = OTHER; note = 2'-O-Methyl-adenosine
  modified_base 89: mod_base = OTHER; note = 2'-O-Methyl-guanosine
  modified_base 90: mod_base = OTHER; note = 2'-O-Methyl-uridine
  modified_base 91: mod_base = OTHER; note = 2'-O-Methyl-cytidine
  modified_base 92: mod_base = OTHER; note = 2'-O-Methyl-guanosine
  modified_base 93: mod_base = OTHER; note = 2'-O-Methyl-guanosine
  modified_base 94: mod_base = OTHER; note = 2'-O-Methyl-uridine
  modified_base 95: mod_base = OTHER; note = 2'-O-Methyl-guanosine
  modified_base 96: mod_base = OTHER; note = 2'-O-Methyl-cytidine
  modified_base 97: mod_base = OTHER; note = 2'-O-Methyl-uridine
  modified_base 98: mod_base = OTHER; note = 2'-O-Methyl-uridine phosphorothioate
  modified_base 99: mod_base = OTHER; note = 2'-O-Methyl-uridine phosphorothioate
  modified_base 100: mod_base = OTHER; note = 2'-O-Methyl-uridine

SEQ ID NO: 2642 - RNA, 103 nt, synthetic construct; identical to SEQ ID NO: 1643
  source 1..103: mol_type = other RNA
  modified_base 1: mod_base = OTHER; note = 2'-O-Methyl-cytidine phosphorothioate
  modified_base 2: mod_base = OTHER; note = 2'-O-Methyl-cytidine phosphorothioate
  modified_base 3: mod_base = OTHER; note = 2'-O-Methyl-cytidine phosphorothioate
  modified_base 21: mod_base = OTHER; note = 2'-O-Methyl-guanosine
  modified_base 25: mod_base = OTHER; note = uridine phosphorothioate
  modified_base 28: mod_base = OTHER; note = 2'-O-Methyl-adenosine
  modified_base 29: mod_base = OTHER; note = 2'-O-Methyl-guanosine
  modified_base 30: mod_base = OTHER; note = 2'-O-Methyl-cytidine
  modified_base 31: mod_base = OTHER; note = 2'-O-Methyl-uridine
  modified_base 32: mod_base = OTHER; note = 2'-O-Methyl-adenosine
  modified_base 34: mod_base = OTHER; note = 2'-O-Methyl-adenosine
  modified_base 35: mod_base = OTHER; note = 2'-O-Methyl-adenosine
  modified_base 36: mod_base = OTHER; note = 2'-O-Methyl-adenosine
  modified_base 37: mod_base = OTHER; note = 2'-O-Methyl-uridine
  modified_base 38: mod_base = OTHER; note = 2'-O-Methyl-adenosine
  modified_base 39: mod_base = OTHER; note = 2'-O-Methyl-guanosine
  modified_base 40: mod_base = OTHER; note = 2'-O-Methyl-cytidine
  modified_base 41: mod_base = OTHER; note = 2'-O-Methyl-adenosine
  modified_base 42: mod_base = OTHER; note = 2'-O-Methyl-adenosine
  modified_base 45: mod_base = OTHER; note = uridine phosphorothioate
  modified_base 46: mod_base = OTHER; note = 2'-O-Methyl-adenosine
  modified_base 48: mod_base = OTHER; note = 2'-O-Methyl-adenosine
  modified_base 50: mod_base = OTHER; note = 2'-O-Methyl-uridine
  modified_base 52: mod_base = OTHER; note = 2'-O-Methyl-adenosine
  modified_base 53: mod_base = OTHER; note = 2'-O-Methyl-guanosine
  modified_base 54: mod_base = OTHER; note = 2'-O-Methyl-guanosine
  modified_base 55: mod_base = OTHER; note = 2'-O-Methyl-cytidine
  modified_base 56: mod_base = OTHER; note = 2'-O-Methyl-uridine
  modified_base 57: mod_base = OTHER; note = 2'-O-Methyl-adenosine
  modified_base 60: mod_base = OTHER; note = 2'-O-Methyl-cytidine
  modified_base 61: mod_base = OTHER; note = 2'-O-Methyl-cytidine
  modified_base 66: mod_base = OTHER; note = 2'-O-Methyl-uridine
  modified_base 67: mod_base = OTHER; note = 2'-O-Methyl-cytidine
  modified_base 70: mod_base = OTHER; note = 2'-O-Methyl-cytidine
  modified_base 71: mod_base = OTHER; note = 2'-O-Methyl-uridine
  modified_base 72: mod_base = OTHER; note = 2'-O-Methyl-uridine
  modified_base 74: mod_base = OTHER; note = 2'-O-Methyl-adenosine
  modified_base 75: mod_base = OTHER; note = 2'-O-Methyl-adenosine
  modified_base 76: mod_base = OTHER; note = 2'-O-Methyl-adenosine
  modified_base 77: mod_base = OTHER; note = 2'-O-Methyl-adenosine
  modified_base 78: mod_base = OTHER; note = 2'-O-Methyl-adenosine
  modified_base 79: mod_base = OTHER; note = 2'-O-Methyl-guanosine
  modified_base 80: mod_base = OTHER; note = 2'-O-Methyl-uridine
  modified_base 81: mod_base = OTHER; note = 2'-O-Methyl-guanosine
  modified_base 83: mod_base = OTHER; note = 2'-O-Methyl-cytidine
  modified_base 84: mod_base = OTHER; note = 2'-O-Methyl-adenosine
  modified_base 85: mod_base = OTHER; note = 2'-O-Methyl-cytidine
  modified_base 86: mod_base = OTHER; note = 2'-O-Methyl-cytidine
  modified_base 87: mod_base = OTHER; note = 2'-O-Methyl-guanosine
  modified_base 88: mod_base = OTHER; note = 2'-O-Methyl-adenosine
  modified_base 89: mod_base = OTHER; note = 2'-O-Methyl-guanosine
  modified_base 90: mod_base = OTHER; note = 2'-O-Methyl-uridine
  modified_base 91: mod_base = OTHER; note = 2'-O-Methyl-cytidine
  modified_base 92: mod_base = OTHER; note = 2'-O-Methyl-guanosine
  modified_base 93: mod_base = OTHER; note = 2'-O-Methyl-guanosine
  modified_base 94: mod_base = OTHER; note = 2'-O-Methyl-uridine
  modified_base 95: mod_base = OTHER; note = 2'-O-Methyl-guanosine
  modified_base 96: mod_base = OTHER; note = 2'-O-Methyl-cytidine
  modified_base 97: mod_base = OTHER; note = 2'-O-Methyl-uridine
  modified_base 98: mod_base = OTHER; note = 2'-O-Methyl-uridine phosphorothioate
  modified_base 99: mod_base = OTHER; note = 2'-O-Methyl-uridine phosphorothioate
  modified_base 100: mod_base = OTHER; note = 2'-O-Methyl-uridine

SEQ ID NO: 2643 - RNA, 103 nt, synthetic construct; identical to SEQ ID NO: 1699
  source 1..103: mol_type = other RNA
  modified_base 1: mod_base = OTHER; note = 2'-O-Methyl-guanosine phosphorothioate
  modified_base 2: mod_base = OTHER; note = 2'-O-Methyl-adenosine phosphorothioate
  modified_base 3: mod_base = OTHER; note = 2'-O-Methyl-guanosine phosphorothioate
  modified_base 21: mod_base = OTHER; note = 2'-O-Methyl-guanosine
  modified_base 25: mod_base = OTHER; note = uridine phosphorothioate
  modified_base 28: mod_base = OTHER; note = 2'-O-Methyl-adenosine
  modified_base 29: mod_base = OTHER; note = 2'-O-Methyl-guanosine
  modified_base 30: mod_base = OTHER; note = 2'-O-Methyl-cytidine
  modified_base 31: mod_base = OTHER; note = 2'-O-Methyl-uridine
  modified_base 32: mod_base = OTHER; note = 2'-O-Methyl-adenosine
  modified_base 33: mod_base = OTHER; note = 2'-O-Methyl-guanosine
  modified_base 34: mod_base = OTHER; note = 2'-O-Methyl-adenosine
  modified_base 35: mod_base = OTHER; note = 2'-O-Methyl-adenosine
  modified_base 36: mod_base = OTHER; note = 2'-O-Methyl-adenosine
  modified_base 37: mod_base = OTHER; note = 2'-O-Methyl-uridine
  modified_base 38: mod_base = OTHER; note = 2'-O-Methyl-adenosine
  modified_base 39: mod_base = OTHER; note = 2'-O-Methyl-guanosine
  modified_base 40: mod_base = OTHER; note = 2'-O-Methyl-cytidine
  modified_base 41: mod_base = OTHER; note = 2'-O-Methyl-adenosine
  modified_base 42: mod_base = OTHER; note = 2'-O-Methyl-adenosine
  modified_base 45: mod_base = OTHER; note = uridine phosphorothioate
  modified_base 46: mod_base = OTHER; note = 2'-O-Methyl-adenosine
  modified_base 48: mod_base = OTHER; note = 2'-O-Methyl-adenosine
  modified_base 50: mod_base = OTHER; note = 2'-O-Methyl-uridine
  modified_base 52: mod_base = OTHER; note = 2'-O-Methyl-adenosine
  modified_base 53: mod_base = OTHER; note = 2'-O-Methyl-guanosine
  modified_base 54: mod_base = OTHER; note = 2'-O-Methyl-guanosine
  modified_base 55: mod_base = OTHER; note = 2'-O-Methyl-cytidine
  modified_base 56: mod_base = OTHER; note = 2'-O-Methyl-uridine
  modified_base 57: mod_base = OTHER; note = 2'-O-Methyl-adenosine
  modified_base 60: mod_base = OTHER; note = 2'-O-Methyl-cytidine
  modified_base 61: mod_base = OTHER; note = 2'-O-Methyl-cytidine
  modified_base 66: mod_base = OTHER; note = 2'-O-Methyl-uridine
  modified_base 67: mod_base = OTHER; note = 2'-O-Methyl-cytidine
  modified_base 70: mod_base = OTHER; note = 2'-O-Methyl-cytidine
  modified_base 71: mod_base = OTHER; note = 2'-O-Methyl-uridine
  modified_base 72: mod_base = OTHER; note = 2'-O-Methyl-uridine
  modified_base 73: mod_base = OTHER; note = 2'-O-Methyl-guanosine
  modified_base 74: mod_base = OTHER; note = 2'-O-Methyl-adenosine
  modified_base 75: mod_base = OTHER; note = 2'-O-Methyl-adenosine
  modified_base 76: mod_base = OTHER; note = 2'-O-Methyl-adenosine
  modified_base 77: mod_base = OTHER; note = 2'-O-Methyl-adenosine
  modified_base 78: mod_base = OTHER; note = 2'-O-Methyl-adenosine
  modified_base 79: mod_base = OTHER; note = 2'-O-Methyl-guanosine
  modified_base 80: mod_base = OTHER; note = 2'-O-Methyl-uridine
  modified_base 81: mod_base = OTHER; note = 2'-O-Methyl-guanosine
  modified_base 83: mod_base = OTHER; note = 2'-O-Methyl-cytidine
  modified_base 84: mod_base = OTHER; note = 2'-O-Methyl-adenosine
  modified_base 85: mod_base = OTHER; note = 2'-O-Methyl-cytidine
  modified_base 86: mod_base = OTHER; note = 2'-O-Methyl-cytidine
  modified_base 87: mod_base = OTHER; note = 2'-O-Methyl-guanosine
  modified_base 88: mod_base = OTHER; note = 2'-O-Methyl-adenosine
  modified_base 89: mod_base = OTHER; note = 2'-O-Methyl-guanosine
  modified_base 90: mod_base = OTHER; note = 2'-O-Methyl-uridine
  modified_base 91: mod_base = OTHER; note = 2'-O-Methyl-cytidine
  modified_base 92: mod_base = OTHER; note = 2'-O-Methyl-guanosine
  modified_base 93: mod_base = OTHER; note = 2'-O-Methyl-guanosine
  modified_base 94: mod_base = OTHER; note = 2'-O-Methyl-uridine
  modified_base 95: mod_base = OTHER; note = 2'-O-Methyl-guanosine
  modified_base 96: mod_base = OTHER; note = 2'-O-Methyl-cytidine
  modified_base 97: mod_base = OTHER; note = 2'-O-Methyl-uridine
  modified_base 98: mod_base = OTHER; note = 2'-O-Methyl-uridine phosphorothioate
  modified_base 99: mod_base = OTHER; note = 2'-O-Methyl-uridine phosphorothioate
  modified_base 100: mod_base = OTHER; note = 2'-O-Methyl-uridine

SEQ ID NO: 2644 - RNA, 103 nt, synthetic construct; identical to SEQ ID NO: 1699
  source 1..103: mol_type = other RNA
  modified_base 1: mod_base = OTHER; note = 2'-O-Methyl-guanosine phosphorothioate
  modified_base 2: mod_base = OTHER; note = 2'-O-Methyl-adenosine phosphorothioate
  modified_base 3: mod_base = OTHER; note = 2'-O-Methyl-guanosine phosphorothioate
  modified_base 21: mod_base = OTHER; note = 2'-O-Methyl-guanosine
  modified_base 25: mod_base = OTHER; note = uridine phosphorothioate
  modified_base 28: mod_base = OTHER; note = 2'-O-Methyl-adenosine
  modified_base 29: mod_base = OTHER; note = 2'-O-Methyl-guanosine
  modified_base 30: mod_base = OTHER; note = 2'-O-Methyl-cytidine
  modified_base 31: mod_base = OTHER; note = 2'-O-Methyl-uridine
  modified_base 32: mod_base = OTHER; note = 2'-O-Methyl-adenosine
  modified_base 34: mod_base = OTHER; note = 2'-O-Methyl-adenosine
  modified_base 35: mod_base = OTHER; note = 2'-O-Methyl-adenosine
  modified_base 36: mod_base = OTHER; note = 2'-O-Methyl-adenosine
  modified_base 37: mod_base = OTHER; note = 2'-O-Methyl-uridine
  modified_base 38: mod_base = OTHER; note = 2'-O-Methyl-adenosine
  modified_base 39: mod_base = OTHER; note = 2'-O-Methyl-guanosine
  modified_base 40: mod_base = OTHER; note = 2'-O-Methyl-cytidine
  modified_base 41: mod_base = OTHER; note = 2'-O-Methyl-adenosine
  modified_base 42: mod_base = OTHER; note = 2'-O-Methyl-adenosine
  modified_base 45: mod_base = OTHER; note = uridine phosphorothioate
  modified_base 46: mod_base = OTHER; note = 2'-O-Methyl-adenosine
  modified_base 48: mod_base = OTHER; note = 2'-O-Methyl-adenosine
  modified_base 50: mod_base = OTHER; note = 2'-O-Methyl-uridine
  modified_base 52: mod_base = OTHER; note = 2'-O-Methyl-adenosine
  modified_base 53: mod_base = OTHER; note = 2'-O-Methyl-guanosine
  modified_base 54: mod_base = OTHER; note = 2'-O-Methyl-guanosine
  modified_base 55: mod_base = OTHER; note = 2'-O-Methyl-cytidine
  modified_base 56: mod_base = OTHER; note = 2'-O-Methyl-uridine
  modified_base 57: mod_base = OTHER; note = 2'-O-Methyl-adenosine
  modified_base 60: mod_base = OTHER; note = 2'-O-Methyl-cytidine
  modified_base 61: mod_base = OTHER; note = 2'-O-Methyl-cytidine
  modified_base 66: mod_base = OTHER; note = 2'-O-Methyl-uridine
  modified_base 67: mod_base = OTHER; note = 2'-O-Methyl-cytidine
  modified_base 70: mod_base = OTHER; note = 2'-O-Methyl-cytidine
  modified_base 71: mod_base = OTHER; note = 2'-O-Methyl-uridine
  modified_base 72: mod_base = OTHER; note = 2'-O-Methyl-uridine
  modified_base 74: mod_base = OTHER; note = 2'-O-Methyl-adenosine
  modified_base 75: mod_base = OTHER; note = 2'-O-Methyl-adenosine
  modified_base 76: mod_base = OTHER; note = 2'-O-Methyl-adenosine
  modified_base 77: mod_base = OTHER; note = 2'-O-Methyl-adenosine
  modified_base 78: mod_base = OTHER; note = 2'-O-Methyl-adenosine
  modified_base 79: mod_base = OTHER; note = 2'-O-Methyl-guanosine
  modified_base 80: mod_base = OTHER; note = 2'-O-Methyl-uridine
  modified_base 81: mod_base = OTHER; note = 2'-O-Methyl-guanosine
  modified_base 83: mod_base = OTHER; note = 2'-O-Methyl-cytidine
  modified_base 84: mod_base = OTHER; note = 2'-O-Methyl-adenosine
  modified_base 85: mod_base = OTHER; note = 2'-O-Methyl-cytidine
  modified_base 86: mod_base = OTHER; note = 2'-O-Methyl-cytidine
  modified_base 87: mod_base = OTHER; note = 2'-O-Methyl-guanosine
  modified_base 88: mod_base = OTHER; note = 2'-O-Methyl-adenosine
  modified_base 89: mod_base = OTHER; note = 2'-O-Methyl-guanosine
  modified_base 90: mod_base = OTHER; note = 2'-O-Methyl-uridine
  modified_base 91: mod_base = OTHER; note = 2'-O-Methyl-cytidine
  modified_base 92: mod_base = OTHER; note = 2'-O-Methyl-guanosine
  modified_base 93: mod_base = OTHER; note = 2'-O-Methyl-guanosine
  modified_base 94: mod_base = OTHER; note = 2'-O-Methyl-uridine
  modified_base 95: mod_base = OTHER; note = 2'-O-Methyl-guanosine
  modified_base 96: mod_base = OTHER; note = 2'-O-Methyl-cytidine
  modified_base 97: mod_base = OTHER; note = 2'-O-Methyl-uridine
  modified_base 98: mod_base = OTHER; note = 2'-O-Methyl-uridine phosphorothioate
  modified_base 99: mod_base = OTHER; note = 2'-O-Methyl-uridine phosphorothioate
  modified_base 100: mod_base = OTHER; note = 2'-O-Methyl-uridine

SEQ ID NO: 2645 - RNA, 103 nt, synthetic construct; identical to SEQ ID NO: 1700
  source 1..103: mol_type = other RNA
  modified_base 1: mod_base = OTHER; note = 2'-O-Methyl-cytidine phosphorothioate
  modified_base 2: mod_base = OTHER; note = 2'-O-Methyl-adenosine phosphorothioate
  modified_base 3: mod_base = OTHER; note = 2'-O-Methyl-guanosine phosphorothioate
  modified_base 21: mod_base = OTHER; note = 2'-O-Methyl-guanosine
  modified_base 25: mod_base = OTHER; note = uridine phosphorothioate
  modified_base 28: mod_base = OTHER; note = 2'-O-Methyl-adenosine
  modified_base 29: mod_base = OTHER; note = 2'-O-Methyl-guanosine
  modified_base 30: mod_base = OTHER; note = 2'-O-Methyl-cytidine
  modified_base 31: mod_base = OTHER; note = 2'-O-Methyl-uridine
  modified_base 32: mod_base = OTHER; note = 2'-O-Methyl-adenosine
  modified_base 33: mod_base = OTHER; note = 2'-O-Methyl-guanosine
  modified_base 34: mod_base = OTHER; note = 2'-O-Methyl-adenosine
  modified_base 35: mod_base = OTHER; note = 2'-O-Methyl-adenosine
  modified_base 36: mod_base = OTHER; note = 2'-O-Methyl-adenosine
  modified_base 37: mod_base = OTHER; note = 2'-O-Methyl-uridine
  modified_base 38: mod_base = OTHER; note = 2'-O-Methyl-adenosine
  modified_base 39: mod_base = OTHER; note = 2'-O-Methyl-guanosine
  modified_base 40: mod_base = OTHER; note = 2'-O-Methyl-cytidine
  modified_base 41: mod_base = OTHER; note = 2'-O-Methyl-adenosine
  modified_base 42: mod_base = OTHER; note = 2'-O-Methyl-adenosine
  modified_base 45: mod_base = OTHER; note = uridine phosphorothioate
  modified_base 46: mod_base = OTHER; note = 2'-O-Methyl-adenosine
  modified_base 48: mod_base = OTHER; note = 2'-O-Methyl-adenosine
  modified_base 50: mod_base = OTHER; note = 2'-O-Methyl-uridine
  modified_base 52: mod_base = OTHER; note = 2'-O-Methyl-adenosine
  modified_base 53: mod_base = OTHER; note = 2'-O-Methyl-guanosine
  modified_base 54: mod_base = OTHER; note = 2'-O-Methyl-guanosine
  modified_base 57: mod_base = OTHER; note = 2'-O-Methyl-adenosine
  modified_base 61: mod_base = OTHER; note = 2'-O-Methyl-cytidine
  modified_base 66: mod_base = OTHER; note = 2'-O-Methyl-uridine
  modified_base 67: mod_base = OTHER; note = 2'-O-Methyl-cytidine
  modified_base 70: mod_base = OTHER; note = 2'-O-Methyl-cytidine
  modified_base 71: mod_base = OTHER; note = 2'-O-Methyl-uridine
  modified_base 72: mod_base = OTHER; note = 2'-O-Methyl-uridine
  modified_base 74: mod_base = OTHER; note = 2'-O-Methyl-adenosine
  modified_base 75: mod_base = OTHER; note = 2'-O-Methyl-adenosine
  modified_base 76: mod_base = OTHER; note = 2'-O-Methyl-adenosine
  modified_base 77: mod_base = OTHER; note = 2'-O-Methyl-adenosine
  modified_base 78: mod_base = OTHER; note = 2'-O-Methyl-adenosine
  modified_base 79: mod_base = OTHER; note = 2'-O-Methyl-guanosine
  modified_base 80: mod_base = OTHER; note = 2'-O-Methyl-uridine
  modified_base 82: mod_base = OTHER; note = 2'-O-Methyl-guanosine
  modified_base 83: mod_base = OTHER; note = 2'-O-Methyl-cytidine
  modified_base 84: mod_base = OTHER; note = 2'-O-Methyl-adenosine
  modified_base 85: mod_base = OTHER; note = 2'-O-Methyl-cytidine
  modified_base 86: mod_base = OTHER; note = 2'-O-Methyl-cytidine
  modified_base 87: mod_base = OTHER; note = 2'-O-Methyl-guanosine
  modified_base 89: mod_base = OTHER; note = 2'-O-Methyl-guanosine
  modified_base 92: mod_base = OTHER; note = 2'-O-Methyl-guanosine
  modified_base 93: mod_base = OTHER; note = 2'-O-Methyl-guanosine
  modified_base 94: mod_base = OTHER; note = 2'-O-Methyl-uridine
  modified_base 95: mod_base = OTHER; note = 2'-O-Methyl-guanosine
  modified_base 96: mod_base = OTHER; note = 2'-O-Methyl-cytidine
  modified_base 97: mod_base = OTHER; note = 2'-O-Methyl-uridine
  modified_base 98: mod_base = OTHER; note = 2'-O-Methyl-uridine phosphorothioate
  modified_base 99: mod_base = OTHER; note = 2'-O-Methyl-uridine phosphorothioate
  modified_base 100: mod_base = OTHER; note = 2'-O-Methyl-uridine

SEQ ID NO: 2646 - RNA, 103 nt, synthetic construct; identical to SEQ ID NO: 1700
  source 1..103: mol_type = other RNA
  modified_base 1: mod_base = OTHER; note = 2'-O-Methyl-cytidine phosphorothioate
  modified_base 2: mod_base = OTHER; note = 2'-O-Methyl-adenosine phosphorothioate
  modified_base 3: mod_base = OTHER; note = 2'-O-Methyl-guanosine phosphorothioate
  modified_base 21: mod_base = OTHER; note = 2'-O-Methyl-guanosine
  modified_base 25: mod_base = OTHER; note = uridine phosphorothioate
  modified_base 28: mod_base = OTHER; note = 2'-O-Methyl-adenosine
  modified_base 29: mod_base = OTHER; note = 2'-O-Methyl-guanosine
  modified_base 30: mod_base = OTHER; note = 2'-O-Methyl-cytidine
  modified_base 31: mod_base = OTHER; note = 2'-O-Methyl-uridine
  modified_base 32: mod_base = OTHER; note = 2'-O-Methyl-adenosine
  modified_base 33: mod_base = OTHER; note = 2'-O-Methyl-guanosine
  modified_base 34: mod_base = OTHER; note = 2'-O-Methyl-adenosine
  modified_base 35: mod_base = OTHER; note = 2'-O-Methyl-adenosine
  modified_base 36: mod_base = OTHER; note = 2'-O-Methyl-adenosine
  modified_base 37: mod_base = OTHER; note = 2'-O-Methyl-uridine
  modified_base 38: mod_base = OTHER; note = 2'-O-Methyl-adenosine
  modified_base 39: mod_base = OTHER; note = 2'-O-Methyl-guanosine
  modified_base 40: mod_base = OTHER; note = 2'-O-Methyl-cytidine
  modified_base 41: mod_base = OTHER; note = 2'-O-Methyl-adenosine
  modified_base 42: mod_base = OTHER; note = 2'-O-Methyl-adenosine
  modified_base 45: mod_base = OTHER; note = uridine phosphorothioate
  modified_base 46: mod_base = OTHER; note = 2'-O-Methyl-adenosine
  modified_base 48: mod_base = OTHER; note = 2'-O-Methyl-adenosine
  modified_base 50: mod_base = OTHER; note = 2'-O-Methyl-uridine
  modified_base 52: mod_base = OTHER; note = 2'-O-Methyl-adenosine
  modified_base 53: mod_base = OTHER; note = 2'-O-Methyl-guanosine
  modified_base 54: mod_base = OTHER; note = 2'-O-Methyl-guanosine
  modified_base 55: mod_base = OTHER; note = 2'-O-Methyl-cytidine
  modified_base 56: mod_base = OTHER; note = 2'-O-Methyl-uridine
  modified_base 57: mod_base = OTHER; note = 2'-O-Methyl-adenosine
  modified_base 60: mod_base = OTHER; note = 2'-O-Methyl-cytidine
  modified_base 61: mod_base = OTHER; note = 2'-O-Methyl-cytidine
  modified_base 66: mod_base = OTHER; note = 2'-O-Methyl-uridine
  modified_base 67: mod_base = OTHER; note = 2'-O-Methyl-cytidine
  modified_base 70: mod_base = OTHER; note = 2'-O-Methyl-cytidine
  modified_base 71: mod_base = OTHER; note = 2'-O-Methyl-uridine
  modified_base 72: mod_base = OTHER; note = 2'-O-Methyl-uridine
  modified_base 74: mod_base = OTHER; note = 2'-O-Methyl-adenosine
  modified_base 75: mod_base = OTHER; note = 2'-O-Methyl-adenosine
  modified_base 76: mod_base = OTHER; note = 2'-O-Methyl-adenosine
  modified_base 77: mod_base = OTHER; note = 2'-O-Methyl-adenosine
  modified_base 78: mod_base = OTHER; note = 2'-O-Methyl-adenosine
  modified_base 79: mod_base = OTHER; note = 2'-O-Methyl-guanosine
  modified_base 80: mod_base = OTHER; note = 2'-O-Methyl-uridine
  modified_base 82: mod_base = OTHER; note = 2'-O-Methyl-guanosine
  modified_base 83: mod_base = OTHER; note = 2'-O-Methyl-cytidine
  modified_base 84: mod_base = OTHER; note = 2'-O-Methyl-adenosine
  modified_base 85: mod_base = OTHER; note = 2'-O-Methyl-cytidine
  modified_base 86: mod_base = OTHER; note = 2'-O-Methyl-cytidine
  modified_base 87: mod_base = OTHER; note = 2'-O-Methyl-guanosine
  modified_base 89: mod_base = OTHER; note = 2'-O-Methyl-guanosine
  modified_base 92: mod_base = OTHER; note = 2'-O-Methyl-guanosine
  modified_base 93: mod_base = OTHER; note = 2'-O-Methyl-guanosine
  modified_base 94: mod_base = OTHER; note = 2'-O-Methyl-uridine
  modified_base 95: mod_base = OTHER; note = 2'-O-Methyl-guanosine
  modified_base 96: mod_base = OTHER; note = 2'-O-Methyl-cytidine
  modified_base 97: mod_base = OTHER; note = 2'-O-Methyl-uridine
  modified_base 98: mod_base = OTHER; note = 2'-O-Methyl-uridine phosphorothioate
  modified_base 99: mod_base = OTHER; note = 2'-O-Methyl-uridine phosphorothioate
  modified_base 100: mod_base = OTHER; note = 2'-O-Methyl-uridine

SEQ ID NO: 2647 - RNA, 103 nt, synthetic construct; identical to SEQ ID NO: 1700
  source 1..103: mol_type = other RNA
  modified_base 1: mod_base = OTHER; note = 2'-O-Methyl-cytidine phosphorothioate
  modified_base 2: mod_base = OTHER; note = 2'-O-Methyl-adenosine phosphorothioate
  modified_base 3: mod_base = OTHER; note = 2'-O-Methyl-guanosine phosphorothioate
  modified_base 21: mod_base = OTHER; note = 2'-O-Methyl-guanosine
  modified_base 25: mod_base = OTHER; note = uridine phosphorothioate
  modified_base 28: mod_base = OTHER; note = 2'-O-Methyl-adenosine
  modified_base 29: mod_base = OTHER; note = 2'-O-Methyl-guanosine
  modified_base 30: mod_base = OTHER; note = 2'-O-Methyl-cytidine
  modified_base 31: mod_base = OTHER; note = 2'-O-Methyl-uridine
  modified_base 32: mod_base = OTHER; note = 2'-O-Methyl-adenosine
  modified_base 33: mod_base = OTHER; note = 2'-O-Methyl-guanosine
  modified_base 34: mod_base = OTHER; note = 2'-O-Methyl-adenosine
  modified_base 35: mod_base = OTHER; note = 2'-O-Methyl-adenosine
  modified_base 36: mod_base = OTHER; note = 2'-O-Methyl-adenosine
  modified_base 37: mod_base = OTHER; note = 2'-O-Methyl-uridine
  modified_base 38: mod_base = OTHER; note = 2'-O-Methyl-adenosine
  modified_base 39: mod_base = OTHER; note = 2'-O-Methyl-guanosine
  modified_base 40: mod_base = OTHER; note = 2'-O-Methyl-cytidine
  modified_base 41: mod_base = OTHER; note = 2'-O-Methyl-adenosine
  modified_base 42: mod_base = OTHER; note = 2'-O-Methyl-adenosine
  modified_base 45: mod_base = OTHER; note = uridine phosphorothioate
  modified_base 46: mod_base = OTHER; note = 2'-O-Methyl-adenosine
  modified_base 48: mod_base = OTHER; note = 2'-O-Methyl-adenosine
  modified_base 50: mod_base = OTHER; note = 2'-O-Methyl-uridine
  modified_base 52: mod_base = OTHER; note = 2'-O-Methyl-adenosine
  modified_base 53: mod_base = OTHER; note = 2'-O-Methyl-guanosine
  modified_base 54: mod_base = OTHER; note = 2'-O-Methyl-guanosine
  modified_base 57: mod_base = OTHER; note = 2'-O-Methyl-adenosine
  modified_base 61: mod_base = OTHER; note = 2'-O-Methyl-cytidine
  modified_base 66: mod_base = OTHER; note = 2'-O-Methyl-uridine
  modified_base 67: mod_base = OTHER; note = 2'-O-Methyl-cytidine
  modified_base 70: mod_base = OTHER; note = 2'-O-Methyl-cytidine
  modified_base 71: mod_base = OTHER; note = 2'-O-Methyl-uridine
  modified_base 72: mod_base = OTHER; note = 2'-O-Methyl-uridine
  modified_base 73: mod_base = OTHER; note = 2'-O-Methyl-guanosine
  modified_base 74: mod_base = OTHER; note = 2'-O-Methyl-adenosine
  modified_base 75: mod_base = OTHER; note = 2'-O-Methyl-adenosine
  modified_base 76: mod_base = OTHER; note = 2'-O-Methyl-adenosine
  modified_base 77: mod_base = OTHER; note = 2'-O-Methyl-adenosine
  modified_base 78: mod_base = OTHER; note = 2'-O-Methyl-adenosine
  modified_base 79: mod_base = OTHER; note = 2'-O-Methyl-guanosine
  modified_base 80: mod_base = OTHER; note = 2'-O-Methyl-uridine
  modified_base 82: mod_base = OTHER; note = 2'-O-Methyl-guanosine
  modified_base 83: mod_base = OTHER; note = 2'-O-Methyl-cytidine
  modified_base 84: mod_base = OTHER; note = 2'-O-Methyl-adenosine
  modified_base 85: mod_base = OTHER; note = 2'-O-Methyl-cytidine
  modified_base 86: mod_base = OTHER; note = 2'-O-Methyl-cytidine
  modified_base 87: mod_base = OTHER; note = 2'-O-Methyl-guanosine
  modified_base 89: mod_base = OTHER; note = 2'-O-Methyl-guanosine
  modified_base 92: mod_base = OTHER; note = 2'-O-Methyl-guanosine
  modified_base 93: mod_base = OTHER; note = 2'-O-Methyl-guanosine
  modified_base 94: mod_base = OTHER; note = 2'-O-Methyl-uridine
  modified_base 95: mod_base = OTHER; note = 2'-O-Methyl-guanosine
  modified_base 96: mod_base = OTHER; note = 2'-O-Methyl-cytidine
  modified_base 97: mod_base = OTHER; note = 2'-O-Methyl-uridine
  modified_base 98: mod_base = OTHER; note = 2'-O-Methyl-uridine phosphorothioate
  modified_base 99: mod_base = OTHER; note = 2'-O-Methyl-uridine phosphorothioate
  modified_base 100: mod_base = OTHER; note = 2'-O-Methyl-uridine

SEQ ID NO: 2648 - RNA, 103 nt, synthetic construct; identical to SEQ ID NO: 1700
  source 1..103: mol_type = other RNA
  modified_base 1: mod_base = OTHER; note = 2'-O-Methyl-cytidine phosphorothioate
  modified_base 2: mod_base = OTHER; note = 2'-O-Methyl-adenosine phosphorothioate
  modified_base 3: mod_base = OTHER; note = 2'-O-Methyl-guanosine phosphorothioate
  modified_base 21: mod_base = OTHER; note = 2'-O-Methyl-guanosine
  modified_base 25: mod_base = OTHER; note = uridine phosphorothioate
  modified_base 28: mod_base = OTHER; note = 2'-O-Methyl-adenosine
  modified_base 29: mod_base = OTHER; note = 2'-O-Methyl-guanosine
  modified_base 30: mod_base = OTHER; note = 2'-O-Methyl-cytidine
  modified_base 31: mod_base = OTHER; note = 2'-O-Methyl-uridine
  modified_base 32: mod_base = OTHER; note = 2'-O-Methyl-adenosine
  modified_base 33: mod_base = OTHER; note = 2'-O-Methyl-guanosine
  modified_base 34: mod_base = OTHER; note = 2'-O-Methyl-adenosine
  modified_base 35: mod_base = OTHER; note = 2'-O-Methyl-adenosine
  modified_base 36: mod_base = OTHER; note = 2'-O-Methyl-adenosine
  modified_base 37: mod_base = OTHER; note = 2'-O-Methyl-uridine
  modified_base 38: mod_base = OTHER; note = 2'-O-Methyl-adenosine
  modified_base 39: mod_base = OTHER; note = 2'-O-Methyl-guanosine
  modified_base 40: mod_base = OTHER; note = 2'-O-Methyl-cytidine
  modified_base 41: mod_base = OTHER; note = 2'-O-Methyl-adenosine
  modified_base 42: mod_base = OTHER; note = 2'-O-Methyl-adenosine
  modified_base 45: mod_base = OTHER; note = uridine phosphorothioate
  modified_base 46: mod_base = OTHER; note = 2'-O-Methyl-adenosine
  modified_base 48: mod_base = OTHER; note = 2'-O-Methyl-adenosine
  modified_base 50: mod_base = OTHER; note = 2'-O-Methyl-uridine
  modified_base 52: mod_base = OTHER; note = 2'-O-Methyl-adenosine
  modified_base 53: mod_base = OTHER; note = 2'-O-Methyl-guanosine
  modified_base 54: mod_base = OTHER; note = 2'-O-Methyl-guanosine
  modified_base 57: mod_base = OTHER; note = 2'-O-Methyl-adenosine
  modified_base 61: mod_base = OTHER; note = 2'-O-Methyl-cytidine
  modified_base 66: mod_base = OTHER; note = 2'-O-Methyl-uridine
  modified_base 67: mod_base = OTHER; note = 2'-O-Methyl-cytidine
  modified_base 70: mod_base = OTHER; note = 2'-O-Methyl-cytidine
  modified_base 71: mod_base = OTHER; note = 2'-O-Methyl-uridine
  modified_base 72: mod_base = OTHER; note = 2'-O-Methyl-uridine
  modified_base 73: mod_base = OTHER; note = 2'-O-Methyl-guanosine
  modified_base 74: mod_base = OTHER; note = 2'-O-Methyl-adenosine
  modified_base 75: mod_base = OTHER; note = 2'-O-Methyl-adenosine
  modified_base 76: mod_base = OTHER; note = 2'-O-Methyl-adenosine
  modified_base 77: mod_base = OTHER; note = 2'-O-Methyl-adenosine
  modified_base 78: mod_base = OTHER; note = 2'-O-Methyl-adenosine
  modified_base 79: mod_base = OTHER; note = 2'-O-Methyl-guanosine
  modified_base 80: mod_base = OTHER; note = 2'-O-Methyl-uridine
  modified_base 82: mod_base = OTHER; note = 2'-O-Methyl-guanosine
  modified_base 83: mod_base = OTHER; note = 2'-O-Methyl-cytidine
  modified_base 84: mod_base = OTHER; note = 2'-O-Methyl-adenosine
  modified_base 85: mod_base = OTHER; note = 2'-O-Methyl-cytidine
  modified_base 86: mod_base = OTHER; note = 2'-O-Methyl-cytidine
  modified_base 87: mod_base = OTHER; note = 2'-O-Methyl-guanosine
  modified_base 89: mod_base = OTHER; note = 2'-O-Methyl-guanosine
  modified_base 91: mod_base = OTHER; note = 2'-O-Methyl-cytidine
  modified_base 92: mod_base = OTHER; note = 2'-O-Methyl-guanosine
  modified_base 93: mod_base = OTHER; note = 2'-O-Methyl-guanosine
  modified_base 94: mod_base = OTHER; note = 2'-O-Methyl-uridine
  modified_base 95: mod_base = OTHER; note = 2'-O-Methyl-guanosine
  modified_base 96: mod_base = OTHER; note = 2'-O-Methyl-cytidine
  modified_base 97: mod_base = OTHER; note = 2'-O-Methyl-uridine
  modified_base 98: mod_base = OTHER; note = 2'-O-Methyl-uridine phosphorothioate
  modified_base 99: mod_base = OTHER; note = 2'-O-Methyl-uridine phosphorothioate
  modified_base 100: mod_base = OTHER; note = 2'-O-Methyl-uridine

SEQ ID NO: 2649 - RNA, 103 nt, synthetic construct; identical to SEQ ID NO: 1700
  source 1..103: mol_type = other RNA
  modified_base 1: mod_base = OTHER; note = 2'-O-Methyl-cytidine phosphorothioate
  modified_base 2: mod_base = OTHER; note = 2'-O-Methyl-adenosine phosphorothioate
  modified_base 3: mod_base = OTHER; note = 2'-O-Methyl-guanosine phosphorothioate
  modified_base 21: mod_base = OTHER; note = 2'-O-Methyl-guanosine
  modified_base 25: mod_base = OTHER; note = uridine phosphorothioate
  modified_base 28: mod_base = OTHER; note = 2'-O-Methyl-adenosine
  modified_base 29: mod_base = OTHER; note = 2'-O-Methyl-guanosine
  modified_base 30: mod_base = OTHER; note = 2'-O-Methyl-cytidine
  modified_base 31: mod_base = OTHER; note = 2'-O-Methyl-uridine
  modified_base 32: mod_base = OTHER; note = 2'-O-Methyl-adenosine
  modified_base 34: mod_base = OTHER; note = 2'-O-Methyl-adenosine
  modified_base 35: mod_base = OTHER; note = 2'-O-Methyl-adenosine
  modified_base 36: mod_base = OTHER; note = 2'-O-Methyl-adenosine
  modified_base 37: mod_base = OTHER; note = 2'-O-Methyl-uridine
  modified_base 38: mod_base = OTHER; note = 2'-O-Methyl-adenosine
  modified_base 39: mod_base = OTHER; note = 2'-O-Methyl-guanosine
  modified_base 40: mod_base = OTHER; note = 2'-O-Methyl-cytidine
  modified_base 41: mod_base = OTHER; note = 2'-O-Methyl-adenosine
  modified_base 42: mod_base = OTHER; note = 2'-O-Methyl-adenosine
  modified_base 45: mod_base = OTHER; note = uridine phosphorothioate
  modified_base 46: mod_base = OTHER; note = 2'-O-Methyl-adenosine
  modified_base 48: mod_base = OTHER; note = 2'-O-Methyl-adenosine
  modified_base 50: mod_base = OTHER; note = 2'-O-Methyl-uridine
  modified_base 52: mod_base = OTHER; note = 2'-O-Methyl-adenosine
  modified_base 53: mod_base = OTHER; note = 2'-O-Methyl-guanosine
  modified_base 54: mod_base = OTHER; note = 2'-O-Methyl-guanosine
  modified_base 57: mod_base = OTHER; note = 2'-O-Methyl-adenosine
  modified_base 61: mod_base = OTHER; note = 2'-O-Methyl-cytidine
  modified_base 66: mod_base = OTHER; note = 2'-O-Methyl-uridine
  modified_base 67: mod_base = OTHER; note = 2'-O-Methyl-cytidine
  modified_base 70: mod_base = OTHER; note = 2'-O-Methyl-cytidine
  modified_base 71: mod_base = OTHER; note = 2'-O-Methyl-uridine
  modified_base 72: mod_base = OTHER; note = 2'-O-Methyl-uridine
  modified_base 73: mod_base = OTHER; note = 2'-O-Methyl-guanosine
  modified_base 74: mod_base = OTHER; note = 2'-O-Methyl-adenosine
  modified_base 75: mod_base = OTHER; note = 2'-O-Methyl-adenosine
  modified_base 76: mod_base = OTHER; note = 2'-O-Methyl-adenosine
  modified_base 77: mod_base = OTHER; note = 2'-O-Methyl-adenosine
  modified_base 78: mod_base = OTHER; note = 2'-O-Methyl-adenosine
  modified_base 79: mod_base = OTHER; note = 2'-O-Methyl-guanosine
  modified_base 80: mod_base = OTHER; note = 2'-O-Methyl-uridine
  modified_base 82: mod_base = OTHER; note = 2'-O-Methyl-guanosine
  modified_base 83: mod_base = OTHER; note = 2'-O-Methyl-cytidine
  modified_base 84: mod_base = OTHER; note = 2'-O-Methyl-adenosine
  modified_base 85: mod_base = OTHER; note = 2'-O-Methyl-cytidine
  modified_base 86: mod_base = OTHER; note = 2'-O-Methyl-cytidine
  modified_base 87: mod_base = OTHER; note = 2'-O-Methyl-guanosine
  modified_base 89: mod_base = OTHER; note = 2'-O-Methyl-guanosine
  modified_base 92: mod_base = OTHER; note = 2'-O-Methyl-guanosine
  modified_base 93: mod_base = OTHER; note = 2'-O-Methyl-guanosine
  modified_base 94: mod_base = OTHER; note = 2'-O-Methyl-uridine
  modified_base 95: mod_base = OTHER; note = 2'-O-Methyl-guanosine
  modified_base 96: mod_base = OTHER; note = 2'-O-Methyl-cytidine
  modified_base 97: mod_base = OTHER; note = 2'-O-Methyl-uridine
  modified_base 98: mod_base = OTHER; note = 2'-O-Methyl-uridine phosphorothioate
  modified_base 99: mod_base = OTHER; note = 2'-O-Methyl-uridine phosphorothioate
  modified_base 100: mod_base = OTHER; note = 2'-O-Methyl-uridine

SEQ ID NO: 2650 - RNA, 103 nt, synthetic construct; identical to SEQ ID NO: 1700
  source 1..103: mol_type = other RNA
  modified_base 1: mod_base = OTHER; note = 2'-O-Methyl-cytidine phosphorothioate
  modified_base 2: mod_base = OTHER; note = 2'-O-Methyl-adenosine phosphorothioate
  modified_base 3: mod_base = OTHER; note = 2'-O-Methyl-guanosine phosphorothioate
  modified_base 21: mod_base = OTHER; note = 2'-O-Methyl-guanosine
  modified_base 25: mod_base = OTHER; note = uridine phosphorothioate
  modified_base 28: mod_base = OTHER; note = 2'-O-Methyl-adenosine
  modified_base 29: mod_base = OTHER; note = 2'-O-Methyl-guanosine
  modified_base 30: mod_base = OTHER; note = 2'-O-Methyl-cytidine
  modified_base 31: mod_base = OTHER; note = 2'-O-Methyl-uridine
  modified_base 32: mod_base = OTHER; note = 2'-O-Methyl-adenosine
  modified_base 34: mod_base = OTHER; note = 2'-O-Methyl-adenosine
  modified_base 35: mod_base = OTHER; note = 2'-O-Methyl-adenosine
  modified_base 36: mod_base = OTHER; note = 2'-O-Methyl-adenosine
  modified_base 37: mod_base = OTHER; note = 2'-O-Methyl-uridine
  modified_base 38: mod_base = OTHER; note = 2'-O-Methyl-adenosine
  modified_base 39: mod_base = OTHER; note = 2'-O-Methyl-guanosine
  modified_base 40: mod_base = OTHER; note = 2'-O-Methyl-cytidine
  modified_base 41: mod_base = OTHER; note = 2'-O-Methyl-adenosine
  modified_base 42: mod_base = OTHER; note = 2'-O-Methyl-adenosine
  modified_base 45: mod_base = OTHER; note = uridine phosphorothioate
  modified_base 46: mod_base = OTHER; note = 2'-O-Methyl-adenosine
  modified_base 48: mod_base = OTHER; note = 2'-O-Methyl-adenosine
  modified_base 50: mod_base = OTHER; note = 2'-O-Methyl-uridine
  modified_base 52: mod_base = OTHER; note = 2'-O-Methyl-adenosine
  modified_base 53: mod_base = OTHER; note = 2'-O-Methyl-guanosine
  modified_base 54: mod_base = OTHER; note = 2'-O-Methyl-guanosine
  modified_base 57: mod_base = OTHER; note = 2'-O-Methyl-adenosine
  modified_base 61: mod_base = OTHER; note = 2'-O-Methyl-cytidine
  modified_base 66: mod_base = OTHER; note = 2'-O-Methyl-uridine
  modified_base 67: mod_base = OTHER; note = 2'-O-Methyl-cytidine
  modified_base 70: mod_base = OTHER; note = 2'-O-Methyl-cytidine
  modified_base 71: mod_base = OTHER; note = 2'-O-Methyl-uridine
  modified_base 72: mod_base = OTHER; note = 2'-O-Methyl-uridine
  modified_base 73: mod_base = OTHER; note = 2'-O-Methyl-guanosine
  modified_base 74: mod_base = OTHER; note = 2'-O-Methyl-adenosine
  modified_base 75: mod_base = OTHER; note = 2'-O-Methyl-adenosine
  modified_base 76: mod_base = OTHER; note = 2'-O-Methyl-adenosine
  modified_base 77: mod_base = OTHER; note = 2'-O-Methyl-adenosine
  modified_base 78: mod_base = OTHER; note = 2'-O-Methyl-adenosine
  modified_base 79: mod_base = OTHER; note = 2'-O-Methyl-guanosine
  modified_base 80: mod_base = OTHER; note = 2'-O-Methyl-uridine
  modified_base 82: mod_base = OTHER; note = 2'-O-Methyl-guanosine
  modified_base 83: mod_base = OTHER; note = 2'-O-Methyl-cytidine
  modified_base 84: mod_base = OTHER; note = 2'-O-Methyl-adenosine
  modified_base 85: mod_base = OTHER; note = 2'-O-Methyl-cytidine
  modified_base 86: mod_base = OTHER; note = 2'-O-Methyl-cytidine
  modified_base 87: mod_base = OTHER; note = 2'-O-Methyl-guanosine
  modified_base 89: mod_base = OTHER; note = 2'-O-Methyl-guanosine
  modified_base 91: mod_base = OTHER; note = 2'-O-Methyl-cytidine
  modified_base 92: mod_base = OTHER; note = 2'-O-Methyl-guanosine
  modified_base 93: mod_base = OTHER; note = 2'-O-Methyl-guanosine
  modified_base 94: mod_base = OTHER; note = 2'-O-Methyl-uridine
  modified_base 95: mod_base = OTHER; note = 2'-O-Methyl-guanosine
  modified_base 96: mod_base = OTHER; note = 2'-O-Methyl-cytidine
  modified_base 97: mod_base = OTHER; note = 2'-O-Methyl-uridine
  modified_base 98: mod_base = OTHER; note = 2'-O-Methyl-uridine phosphorothioate
  modified_base 99: mod_base = OTHER; note = 2'-O-Methyl-uridine phosphorothioate
  modified_base 100: mod_base = OTHER; note = 2'-O-Methyl-uridine

SEQ ID NO: 2651 - RNA, 103 nt, synthetic construct; identical to SEQ ID NO: 1700
  source 1..103: mol_type = other RNA
  modified_base 1: mod_base = OTHER; note = 2'-O-Methyl-cytidine phosphorothioate
  modified_base 2: mod_base = OTHER; note = 2'-O-Methyl-adenosine phosphorothioate
  modified_base 3: mod_base = OTHER; note = 2'-O-Methyl-guanosine phosphorothioate
  modified_base 21: mod_base = OTHER; note = 2'-O-Methyl-guanosine
  modified_base 25: mod_base = OTHER; note = uridine phosphorothioate
  modified_base 28: mod_base = OTHER; note = 2'-O-Methyl-adenosine
  modified_base 29: mod_base = OTHER; note = 2'-O-Methyl-guanosine
  modified_base 30: mod_base = OTHER; note = 2'-O-Methyl-cytidine
  modified_base 31: mod_base = OTHER; note = 2'-O-Methyl-uridine
  modified_base 32: mod_base = OTHER; note = 2'-O-Methyl-adenosine
  modified_base 34: mod_base = OTHER; note = 2'-O-Methyl-adenosine
  modified_base 35: mod_base = OTHER; note = 2'-O-Methyl-adenosine
  modified_base 36: mod_base = OTHER; note = 2'-O-Methyl-adenosine
  modified_base 37: mod_base = OTHER; note = 2'-O-Methyl-uridine
  modified_base 38: mod_base = OTHER; note = 2'-O-Methyl-adenosine
  modified_base 39: mod_base = OTHER; note = 2'-O-Methyl-guanosine
  modified_base 40: mod_base = OTHER; note = 2'-O-Methyl-cytidine
  modified_base 41: mod_base = OTHER; note = 2'-O-Methyl-adenosine
  modified_base 42: mod_base = OTHER; note = 2'-O-Methyl-adenosine
  modified_base 45: mod_base = OTHER; note = uridine phosphorothioate
  modified_base 46: mod_base = OTHER; note = 2'-O-Methyl-adenosine
  modified_base 48: mod_base = OTHER; note = 2'-O-Methyl-adenosine
  modified_base 50: mod_base = OTHER; note = 2'-O-Methyl-uridine
  modified_base 52: mod_base = OTHER; note = 2'-O-Methyl-adenosine
  modified_base 53: mod_base = OTHER; note = 2'-O-Methyl-guanosine
  modified_base 54: mod_base = OTHER; note = 2'-O-Methyl-guanosine
  modified_base 55: mod_base = OTHER; note = 2'-O-Methyl-cytidine
  modified_base 56: mod_base = OTHER; note = 2'-O-Methyl-uridine
  modified_base 57: mod_base = OTHER; note = 2'-O-Methyl-adenosine
  modified_base 60: mod_base = OTHER; note = 2'-O-Methyl-cytidine
  modified_base 61: mod_base = OTHER; note = 2'-O-Methyl-cytidine
  modified_base 66: mod_base = OTHER; note = 2'-O-Methyl-uridine
  modified_base 67: mod_base = OTHER; note = 2'-O-Methyl-cytidine
  modified_base 70: mod_base = OTHER; note = 2'-O-Methyl-cytidine
  modified_base 71: mod_base = OTHER; note = 2'-O-Methyl-uridine
  modified_base 72: mod_base = OTHER; note = 2'-O-Methyl-uridine
  modified_base 74: mod_base = OTHER; note = 2'-O-Methyl-adenosine
  modified_base 75: mod_base = OTHER; note = 2'-O-Methyl-adenosine
  modified_base 76: mod_base = OTHER; note = 2'-O-Methyl-adenosine
  modified_base 77: mod_base = OTHER; note = 2'-O-Methyl-adenosine
  modified_base 78: mod_base = OTHER; note = 2'-O-Methyl-adenosine
  modified_base 79: mod_base = OTHER; note = 2'-O-Methyl-guanosine
  modified_base 80: mod_base = OTHER; note = 2'-O-Methyl-uridine
  modified_base 82: mod_base = OTHER; note = 2'-O-Methyl-guanosine
  modified_base 83: mod_base = OTHER; note = 2'-O-Methyl-cytidine
  modified_base 84: mod_base = OTHER; note = 2'-O-Methyl-adenosine
  modified_base 85: mod_base = OTHER; note = 2'-O-Methyl-cytidine
  modified_base 86: mod_base = OTHER; note = 2'-O-Methyl-cytidine
  modified_base 87: mod_base = OTHER; note = 2'-O-Methyl-guanosine
  modified_base 89: mod_base = OTHER; note = 2'-O-Methyl-guanosine
  modified_base 92: mod_base = OTHER; note = 2'-O-Methyl-guanosine
  modified_base 93: mod_base = OTHER; note = 2'-O-Methyl-guanosine
  modified_base 94: mod_base = OTHER; note = 2'-O-Methyl-uridine
  modified_base 95: mod_base = OTHER; note = 2'-O-Methyl-guanosine
  modified_base 96: mod_base = OTHER; note = 2'-O-Methyl-cytidine
  modified_base 97: mod_base = OTHER; note = 2'-O-Methyl-uridine
  modified_base 98: mod_base = OTHER; note = 2'-O-Methyl-uridine phosphorothioate
  modified_base 99: mod_base = OTHER; note = 2'-O-Methyl-uridine phosphorothioate
  modified_base 100: mod_base = OTHER; note = 2'-O-Methyl-uridine

SEQ ID NO: 2652 - RNA, 103 nt, synthetic construct; identical to SEQ ID NO: 1643
  source 1..103: mol_type = other RNA
  modified_base 1: mod_base = OTHER; note = 2'-O-Methyl-cytidine phosphorothioate
  modified_base 2: mod_base = OTHER; note = 2'-O-Methyl-cytidine phosphorothioate
  modified_base 3: mod_base = OTHER; note = 2'-O-Methyl-cytidine phosphorothioate
  modified_base 21: mod_base = OTHER; note = 2'-O-Methyl-guanosine
  modified_base 25: mod_base = OTHER; note = uridine phosphorothioate
  modified_base 28: mod_base = OTHER; note = 2'-O-Methyl-adenosine
  modified_base 29: mod_base = OTHER; note = 2'-O-Methyl-guanosine
  modified_base 30: mod_base = OTHER; note = 2'-O-Methyl-cytidine
  modified_base 31: mod_base = OTHER; note = 2'-O-Methyl-uridine
  modified_base 32: mod_base = OTHER; note = 2'-O-Methyl-adenosine
  modified_base 33: mod_base = OTHER; note = 2'-O-Methyl-guanosine
  modified_base 34: mod_base = OTHER; note = 2'-O-Methyl-adenosine
  modified_base 35: mod_base = OTHER; note = 2'-O-Methyl-adenosine
  modified_base 36: mod_base = OTHER; note = 2'-O-Methyl-adenosine
  modified_base 37: mod_base = OTHER; note = 2'-O-Methyl-uridine
  modified_base 38: mod_base = OTHER; note = 2'-O-Methyl-adenosine
  modified_base 39: mod_base = OTHER; note = 2'-O-Methyl-guanosine
  modified_base 40: mod_base = OTHER; note = 2'-O-Methyl-cytidine
  modified_base 41: mod_base = OTHER; note = 2'-O-Methyl-adenosine
  modified_base 42: mod_base = OTHER; note = 2'-O-Methyl-adenosine
  modified_base 46: mod_base = OTHER; note = 2'-O-Methyl-adenosine
  modified_base 48: mod_base = OTHER; note = 2'-O-Methyl-adenosine
  modified_base 50: mod_base = OTHER; note = 2'-O-Methyl-uridine
  modified_base 52: mod_base = OTHER; note = 2'-O-Methyl-adenosine
  modified_base 53: mod_base = OTHER; note = 2'-O-Methyl-guanosine
  modified_base 54: mod_base = OTHER; note = 2'-O-Methyl-guanosine
  modified_base 55: mod_base = OTHER; note = 2'-O-Methyl-cytidine
  modified_base 56: mod_base = OTHER; note = 2'-O-Methyl-uridine
  modified_base 57: mod_base = OTHER; note = 2'-O-Methyl-adenosine
  modified_base 60: mod_base = OTHER; note = 2'-O-Methyl-cytidine
  modified_base 61: mod_base = OTHER; note = 2'-O-Methyl-cytidine
  modified_base 64: mod_base = OTHER; note = uridine phosphorothioate
  modified_base 66: mod_base = OTHER; note = 2'-O-Methyl-uridine
  modified_base 67: mod_base = OTHER; note = 2'-O-Methyl-cytidine
  modified_base 70: mod_base = OTHER; note = 2'-O-Methyl-cytidine
  modified_base 71: mod_base = OTHER; note = 2'-O-Methyl-uridine
  modified_base 72: mod_base = OTHER; note = 2'-O-Methyl-uridine
  modified_base 73: mod_base = OTHER; note = 2'-O-Methyl-guanosine
  modified_base 74: mod_base = OTHER; note = 2'-O-Methyl-adenosine
  modified_base 75: mod_base = OTHER; note = 2'-O-Methyl-adenosine
  modified_base 76: mod_base = OTHER; note = 2'-O-Methyl-adenosine
  modified_base 77: mod_base = OTHER; note = 2'-O-Methyl-adenosine
  modified_base 78: mod_base = OTHER; note = 2'-O-Methyl-adenosine
  modified_base 79: mod_base = OTHER; note = 2'-O-Methyl-guanosine
  modified_base 80: mod_base = OTHER; note = 2'-O-Methyl-uridine
  modified_base 81: mod_base = OTHER; note = 2'-O-Methyl-guanosine
  modified_base 83: mod_base = OTHER; note = 2'-O-Methyl-cytidine
  modified_base 84: mod_base = OTHER; note = 2'-O-Methyl-adenosine
  modified_base 85: mod_base = OTHER; note = 2'-O-Methyl-cytidine
  modified_base 86: mod_base = OTHER; note = 2'-O-Methyl-cytidine
  modified_base 87: mod_base = OTHER; note = 2'-O-Methyl-guanosine
  modified_base 88: mod_base = OTHER; note = 2'-O-Methyl-adenosine
  modified_base 89: mod_base = OTHER; note = 2'-O-Methyl-guanosine
  modified_base 90: mod_base = OTHER; note = 2'-O-Methyl-uridine
  modified_base 91: mod_base = OTHER; note = 2'-O-Methyl-cytidine
  modified_base 92: mod_base = OTHER; note = 2'-O-Methyl-guanosine
  modified_base 93: mod_base = OTHER; note = 2'-O-Methyl-guanosine
  modified_base 94: mod_base = OTHER; note = 2'-O-Methyl-uridine
  modified_base 95: mod_base = OTHER; note = 2'-O-Methyl-guanosine
  modified_base 96: mod_base = OTHER; note = 2'-O-Methyl-cytidine
  modified_base 97: mod_base = OTHER; note = 2'-O-Methyl-uridine
  modified_base 98: mod_base = OTHER; note = 2'-O-Methyl-uridine phosphorothioate
  modified_base 99: mod_base = OTHER; note = 2'-O-Methyl-uridine phosphorothioate
  modified_base 100: mod_base = OTHER; note = 2'-O-Methyl-uridine

SEQ ID NO: 2653 - RNA, 103 nt, synthetic construct; identical to SEQ ID NO: 1643
  source 1..103: mol_type = other RNA
  modified_base 1: mod_base = OTHER; note = 2'-O-Methyl-cytidine phosphorothioate
  modified_base 2: mod_base = OTHER; note = 2'-O-Methyl-cytidine phosphorothioate
  modified_base 3: mod_base = OTHER; note = 2'-O-Methyl-cytidine phosphorothioate
  modified_base 21: mod_base = OTHER; note = 2'-O-Methyl-guanosine
  modified_base 25: mod_base = OTHER; note = uridine phosphorothioate
  modified_base 28: mod_base = OTHER; note = 2'-O-Methyl-adenosine
  modified_base 29: mod_base = OTHER; note = 2'-O-Methyl-guanosine
  modified_base 30: mod_base = OTHER; note = 2'-O-Methyl-cytidine
  modified_base 31: mod_base = OTHER; note = 2'-O-Methyl-uridine
  modified_base 32: mod_base = OTHER; note = 2'-O-Methyl-adenosine
  modified_base 34: mod_base = OTHER; note = 2'-O-Methyl-adenosine
  modified_base 35: mod_base = OTHER; note = 2'-O-Methyl-adenosine
  modified_base 36: mod_base = OTHER; note = 2'-O-Methyl-adenosine
  modified_base 37: mod_base = OTHER; note = 2'-O-Methyl-uridine
  modified_base 38: mod_base = OTHER; note = 2'-O-Methyl-adenosine
  modified_base 39: mod_base = OTHER; note = 2'-O-Methyl-guanosine
  modified_base 40: mod_base = OTHER; note = 2'-O-Methyl-cytidine
  modified_base 41: mod_base = OTHER; note = 2'-O-Methyl-adenosine
  modified_base 42: mod_base = OTHER; note = 2'-O-Methyl-adenosine
  modified_base 46: mod_base = OTHER; note = 2'-O-Methyl-adenosine
  modified_base 48: mod_base = OTHER; note = 2'-O-Methyl-adenosine
  modified_base 50: mod_base = OTHER; note = 2'-O-Methyl-uridine
  modified_base 52: mod_base = OTHER; note = 2'-O-Methyl-adenosine
  modified_base 53: mod_base = OTHER; note = 2'-O-Methyl-guanosine
  modified_base 54: mod_base = OTHER; note = 2'-O-Methyl-guanosine
  modified_base 55: mod_base = OTHER; note = 2'-O-Methyl-cytidine
  modified_base 56: mod_base = OTHER; note = 2'-O-Methyl-uridine
  modified_base 57: mod_base = OTHER; note = 2'-O-Methyl-adenosine
  modified_base 60: mod_base = OTHER; note = 2'-O-Methyl-cytidine
  modified_base 61: mod_base = OTHER; note = 2'-O-Methyl-cytidine
  modified_base 64: mod_base = OTHER; note = uridine phosphorothioate
  modified_base 66: mod_base = OTHER; note = 2'-O-Methyl-uridine
  modified_base 67: mod_base = OTHER; note = 2'-O-Methyl-cytidine
  modified_base 70: mod_base = OTHER; note = 2'-O-Methyl-cytidine
  modified_base 71: mod_base = OTHER; note = 2'-O-Methyl-uridine
  modified_base 72: mod_base = OTHER; note = 2'-O-Methyl-uridine
  modified_base 74: mod_base = OTHER; note = 2'-O-Methyl-adenosine
  modified_base 75: mod_base = OTHER; note = 2'-O-Methyl-adenosine
  modified_base 76: mod_base = OTHER; note = 2'-O-Methyl-adenosine
  modified_base 77: mod_base = OTHER; note = 2'-O-Methyl-adenosine
  modified_base 78: mod_base = OTHER; note = 2'-O-Methyl-adenosine
  modified_base 79: mod_base = OTHER; note = 2'-O-Methyl-guanosine
  modified_base 80: mod_base = OTHER; note = 2'-O-Methyl-uridine
  modified_base 81: mod_base = OTHER; note = 2'-O-Methyl-guanosine
  modified_base 83: mod_base = OTHER; note = 2'-O-Methyl-cytidine
  modified_base 84: mod_base = OTHER; note = 2'-O-Methyl-adenosine
  modified_base 85: mod_base = OTHER; note = 2'-O-Methyl-cytidine
  modified_base 86: mod_base = OTHER; note = 2'-O-Methyl-cytidine
  modified_base 87: mod_base = OTHER; note = 2'-O-Methyl-guanosine
  modified_base 88: mod_base = OTHER; note = 2'-O-Methyl-adenosine
  modified_base 89: mod_base = OTHER; note = 2'-O-Methyl-guanosine
  modified_base 90: mod_base = OTHER; note = 2'-O-Methyl-uridine
  modified_base 91: mod_base = OTHER; note = 2'-O-Methyl-cytidine
  modified_base 92: mod_base = OTHER; note = 2'-O-Methyl-guanosine
  modified_base 93: mod_base = OTHER; note = 2'-O-Methyl-guanosine
  modified_base 94: mod_base = OTHER; note = 2'-O-Methyl-uridine
  modified_base 95: mod_base = OTHER; note = 2'-O-Methyl-guanosine
  modified_base 96: mod_base = OTHER; note = 2'-O-Methyl-cytidine
  modified_base 97: mod_base = OTHER; note = 2'-O-Methyl-uridine
  modified_base 98: mod_base = OTHER; note = 2'-O-Methyl-uridine phosphorothioate
  modified_base 99: mod_base = OTHER; note = 2'-O-Methyl-uridine phosphorothioate
  modified_base 100: mod_base = OTHER; note = 2'-O-Methyl-uridine

SEQ ID NO: 2654 - RNA, 103 nt, synthetic construct; identical to SEQ ID NO: 1699
  source 1..103: mol_type = other RNA
  modified_base 1: mod_base = OTHER; note = 2'-O-Methyl-guanosine phosphorothioate
  modified_base 2: mod_base = OTHER; note = 2'-O-Methyl-adenosine phosphorothioate
  modified_base 3: mod_base = OTHER; note = 2'-O-Methyl-guanosine phosphorothioate
  modified_base 21: mod_base = OTHER; note = 2'-O-Methyl-guanosine
  modified_base 25: mod_base = OTHER; note = uridine phosphorothioate
  modified_base 28: mod_base = OTHER; note = 2'-O-Methyl-adenosine
  modified_base 29: mod_base = OTHER; note = 2'-O-Methyl-guanosine
  modified_base 30: mod_base = OTHER; note = 2'-O-Methyl-cytidine
  modified_base 31: mod_base = OTHER; note = 2'-O-Methyl-uridine
  modified_base 32: mod_base = OTHER; note = 2'-O-Methyl-adenosine
  modified_base 33: mod_base = OTHER; note = 2'-O-Methyl-guanosine
  modified_base 34: mod_base = OTHER; note = 2'-O-Methyl-adenosine
  modified_base 35: mod_base = OTHER; note = 2'-O-Methyl-adenosine
  modified_base 36: mod_base = OTHER; note = 2'-O-Methyl-adenosine
  modified_base 37: mod_base = OTHER; note = 2'-O-Methyl-uridine
  modified_base 38: mod_base = OTHER; note = 2'-O-Methyl-adenosine
  modified_base 39: mod_base = OTHER; note = 2'-O-Methyl-guanosine
  modified_base 40: mod_base = OTHER; note = 2'-O-Methyl-cytidine
  modified_base 41: mod_base = OTHER; note = 2'-O-Methyl-adenosine
  modified_base 42: mod_base = OTHER; note = 2'-O-Methyl-adenosine
  modified_base 46: mod_base = OTHER; note = 2'-O-Methyl-adenosine
  modified_base 48: mod_base = OTHER; note = 2'-O-Methyl-adenosine
  modified_base 50: mod_base = OTHER; note = 2'-O-Methyl-uridine
  modified_base 52: mod_base = OTHER; note = 2'-O-Methyl-adenosine
  modified_base 53: mod_base = OTHER; note = 2'-O-Methyl-guanosine
  modified_base 54: mod_base = OTHER; note = 2'-O-Methyl-guanosine
  modified_base 55: mod_base = OTHER; note = 2'-O-Methyl-cytidine
  modified_base 56: mod_base = OTHER; note = 2'-O-Methyl-uridine
  modified_base 57: mod_base = OTHER; note = 2'-O-Methyl-adenosine
  modified_base 60: mod_base = OTHER; note = 2'-O-Methyl-cytidine
  modified_base 61: mod_base = OTHER; note = 2'-O-Methyl-cytidine
  modified_base 64: mod_base = OTHER; note = uridine phosphorothioate
  modified_base 66: mod_base = OTHER; note = 2'-O-Methyl-uridine
  modified_base 67: mod_base = OTHER; note = 2'-O-Methyl-cytidine
  modified_base 70: mod_base = OTHER; note = 2'-O-Methyl-cytidine
  modified_base 71: mod_base = OTHER; note = 2'-O-Methyl-uridine
  modified_base 72: mod_base = OTHER; note = 2'-O-Methyl-uridine
  modified_base 73: mod_base = OTHER; note = 2'-O-Methyl-guanosine
  modified_base 74: mod_base = OTHER; note = 2'-O-Methyl-adenosine
  modified_base 75: mod_base = OTHER; note = 2'-O-Methyl-adenosine
  modified_base 76: mod_base = OTHER; note = 2'-O-Methyl-adenosine
  modified_base 77: mod_base = OTHER; note = 2'-O-Methyl-adenosine
  modified_base 78: mod_base = OTHER; note = 2'-O-Methyl-adenosine
  modified_base 79: mod_base = OTHER; note = 2'-O-Methyl-guanosine
  modified_base 80: mod_base = OTHER; note = 2'-O-Methyl-uridine
  modified_base 81: mod_base = OTHER; note = 2'-O-Methyl-guanosine
  modified_base 83: mod_base = OTHER; note = 2'-O-Methyl-cytidine
  modified_base 84: mod_base = OTHER; note = 2'-O-Methyl-adenosine
  modified_base 85: mod_base = OTHER; note = 2'-O-Methyl-cytidine
  modified_base 86: mod_base = OTHER; note = 2'-O-Methyl-cytidine
  modified_base 87: mod_base = OTHER; note = 2'-O-Methyl-guanosine
  modified_base 88: mod_base = OTHER; note = 2'-O-Methyl-adenosine
  modified_base 89: mod_base = OTHER; note = 2'-O-Methyl-guanosine
  modified_base 90: mod_base = OTHER; note = 2'-O-Methyl-uridine
  modified_base 91: mod_base = OTHER; note = 2'-O-Methyl-cytidine
  modified_base 92: mod_base = OTHER; note = 2'-O-Methyl-guanosine
  modified_base 93: mod_base = OTHER; note = 2'-O-Methyl-guanosine
  modified_base 94: mod_base = OTHER; note = 2'-O-Methyl-uridine
  modified_base 95: mod_base = OTHER; note = 2'-O-Methyl-guanosine
  modified_base 96: mod_base = OTHER; note = 2'-O-Methyl-cytidine
  modified_base 97: mod_base = OTHER; note = 2'-O-Methyl-uridine
  modified_base 98: mod_base = OTHER; note = 2'-O-Methyl-uridine phosphorothioate
  modified_base 99: mod_base = OTHER; note = 2'-O-Methyl-uridine phosphorothioate
  modified_base 100: mod_base = OTHER; note = 2'-O-Methyl-uridine

SEQ ID NO: 2655 - RNA, 103 nt, synthetic construct; identical to SEQ ID NO: 1699
  source 1..103: mol_type = other RNA
  modified_base 1: mod_base = OTHER; note = 2'-O-Methyl-guanosine phosphorothioate
  modified_base 2: mod_base = OTHER; note = 2'-O-Methyl-adenosine phosphorothioate
  modified_base 3: mod_base = OTHER; note = 2'-O-Methyl-guanosine phosphorothioate
  modified_base 21: mod_base = OTHER; note = 2'-O-Methyl-guanosine
  modified_base 25: mod_base = OTHER; note = uridine phosphorothioate
  modified_base 28: mod_base = OTHER; note = 2'-O-Methyl-adenosine
  modified_base 29: mod_base = OTHER; note = 2'-O-Methyl-guanosine
  modified_base 30: mod_base = OTHER; note = 2'-O-Methyl-cytidine
  modified_base 31: mod_base = OTHER; note = 2'-O-Methyl-uridine
  modified_base 32: mod_base = OTHER; note = 2'-O-Methyl-adenosine
  modified_base 34: mod_base = OTHER; note = 2'-O-Methyl-adenosine
  modified_base 35: mod_base = OTHER; note = 2'-O-Methyl-adenosine
  modified_base 36: mod_base = OTHER; note = 2'-O-Methyl-adenosine
  modified_base 37: mod_base = OTHER; note = 2'-O-Methyl-uridine
  modified_base 38: mod_base = OTHER; note = 2'-O-Methyl-adenosine
  modified_base 39: mod_base = OTHER; note = 2'-O-Methyl-guanosine
  modified_base 40: mod_base = OTHER; note = 2'-O-Methyl-cytidine
  modified_base 41: mod_base = OTHER; note = 2'-O-Methyl-adenosine
  modified_base 42: mod_base = OTHER; note = 2'-O-Methyl-adenosine
  modified_base 46: mod_base = OTHER; note = 2'-O-Methyl-adenosine
  modified_base 48: mod_base = OTHER; note = 2'-O-Methyl-adenosine
  modified_base 50: mod_base = OTHER; note = 2'-O-Methyl-uridine
  modified_base 52: mod_base = OTHER; note = 2'-O-Methyl-adenosine
  modified_base 53: mod_base = OTHER; note = 2'-O-Methyl-guanosine
  modified_base 54: mod_base = OTHER; note = 2'-O-Methyl-guanosine
  modified_base 55: mod_base = OTHER; note = 2'-O-Methyl-cytidine
  modified_base 56: mod_base = OTHER; note = 2'-O-Methyl-uridine
  modified_base 57: mod_base = OTHER; note = 2'-O-Methyl-adenosine
  modified_base 60: mod_base = OTHER; note = 2'-O-Methyl-cytidine
  modified_base 61: mod_base = OTHER; note = 2'-O-Methyl-cytidine
  modified_base 64: mod_base = OTHER; note = uridine phosphorothioate
  modified_base 66: mod_base = OTHER; note = 2'-O-Methyl-uridine
  modified_base 67: mod_base = OTHER; note = 2'-O-Methyl-cytidine
  modified_base 70: mod_base = OTHER; note = 2'-O-Methyl-cytidine
  modified_base 71: mod_base = OTHER; note = 2'-O-Methyl-uridine
  modified_base 72: mod_base = OTHER; note = 2'-O-Methyl-uridine
  modified_base 74: mod_base = OTHER; note = 2'-O-Methyl-adenosine
  modified_base 75: mod_base = OTHER; note = 2'-O-Methyl-adenosine
  modified_base 76: mod_base = OTHER; note = 2'-O-Methyl-adenosine
  modified_base 77: mod_base = OTHER; note = 2'-O-Methyl-adenosine
  modified_base 78: mod_base = OTHER; note = 2'-O-Methyl-adenosine
  modified_base 79: mod_base = OTHER; note = 2'-O-Methyl-guanosine
  modified_base 80: mod_base = OTHER; note = 2'-O-Methyl-uridine
  modified_base 81: mod_base = OTHER; note = 2'-O-Methyl-guanosine
  modified_base 83: mod_base = OTHER; note = 2'-O-Methyl-cytidine
  modified_base 84: mod_base = OTHER; note = 2'-O-Methyl-adenosine
  modified_base 85: mod_base = OTHER; note = 2'-O-Methyl-cytidine
  modified_base 86: mod_base = OTHER; note = 2'-O-Methyl-cytidine
  modified_base 87: mod_base = OTHER; note = 2'-O-Methyl-guanosine
  modified_base 88: mod_base = OTHER; note = 2'-O-Methyl-adenosine
  modified_base 89: mod_base = OTHER; note = 2'-O-Methyl-guanosine
  modified_base 90: mod_base = OTHER; note = 2'-O-Methyl-uridine
  modified_base 91: mod_base = OTHER; note = 2'-O-Methyl-cytidine
  modified_base 92: mod_base = OTHER; note = 2'-O-Methyl-guanosine
  modified_base 93: mod_base = OTHER; note = 2'-O-Methyl-guanosine
  modified_base 94: mod_base = OTHER; note = 2'-O-Methyl-uridine
  modified_base 95: mod_base = OTHER; note = 2'-O-Methyl-guanosine
  modified_base 96: mod_base = OTHER; note = 2'-O-Methyl-cytidine
  modified_base 97: mod_base = OTHER; note = 2'-O-Methyl-uridine
  modified_base 98: mod_base = OTHER; note = 2'-O-Methyl-uridine phosphorothioate
  modified_base 99: mod_base = OTHER; note = 2'-O-Methyl-uridine phosphorothioate
  modified_base 100: mod_base = OTHER; note = 2'-O-Methyl-uridine

SEQ ID NO: 2656 - RNA, 103 nt, synthetic construct; identical to SEQ ID NO: 1700
  source 1..103: mol_type = other RNA
  modified_base 1: mod_base = OTHER; note = 2'-O-Methyl-cytidine phosphorothioate
  modified_base 2: mod_base = OTHER; note = 2'-O-Methyl-adenosine phosphorothioate
  modified_base 3: mod_base = OTHER; note = 2'-O-Methyl-guanosine phosphorothioate
  modified_base 21: mod_base = OTHER; note = 2'-O-Methyl-guanosine
  modified_base 25: mod_base = OTHER; note = uridine phosphorothioate
  modified_base 28: mod_base = OTHER; note = 2'-O-Methyl-adenosine
  modified_base 29: mod_base = OTHER; note = 2'-O-Methyl-guanosine
  modified_base 30: mod_base = OTHER; note = 2'-O-Methyl-cytidine
  modified_base 31: mod_base = OTHER; note = 2'-O-Methyl-uridine
  modified_base 32: mod_base = OTHER; note = 2'-O-Methyl-adenosine
  modified_base 33: mod_base = OTHER; note = 2'-O-Methyl-guanosine
  modified_base 34: mod_base = OTHER; note = 2'-O-Methyl-adenosine
  modified_base 35: mod_base = OTHER; note = 2'-O-Methyl-adenosine
  modified_base 36: mod_base = OTHER; note = 2'-O-Methyl-adenosine
  modified_base 37: mod_base = OTHER; note = 2'-O-Methyl-uridine
  modified_base 38: mod_base = OTHER; note = 2'-O-Methyl-adenosine
  modified_base 39: mod_base = OTHER; note = 2'-O-Methyl-guanosine
  modified_base 40: mod_base = OTHER; note = 2'-O-Methyl-cytidine
  modified_base 41: mod_base = OTHER; note = 2'-O-Methyl-adenosine
  modified_base 42: mod_base = OTHER; note = 2'-O-Methyl-adenosine
  modified_base 46: mod_base = OTHER; note = 2'-O-Methyl-adenosine
  modified_base 48: mod_base = OTHER; note = 2'-O-Methyl-adenosine
  modified_base 50: mod_base = OTHER; note = 2'-O-Methyl-uridine
  modified_base 52: mod_base = OTHER; note = 2'-O-Methyl-adenosine
  modified_base 53: mod_base = OTHER; note = 2'-O-Methyl-guanosine
  modified_base 54: mod_base = OTHER; note = 2'-O-Methyl-guanosine
  modified_base 57: mod_base = OTHER; note = 2'-O-Methyl-adenosine
  modified_base 61: mod_base = OTHER; note = 2'-O-Methyl-cytidine
  modified_base 64: mod_base = OTHER; note = uridine phosphorothioate
  modified_base 66: mod_base = OTHER; note = 2'-O-Methyl-uridine
  modified_base 67: mod_base = OTHER; note = 2'-O-Methyl-cytidine
  modified_base 70: mod_base = OTHER; note = 2'-O-Methyl-cytidine
  modified_base 71: mod_base = OTHER; note = 2'-O-Methyl-uridine
  modified_base 72: mod_base = OTHER; note = 2'-O-Methyl-uridine
  modified_base 74: mod_base = OTHER; note = 2'-O-Methyl-adenosine
  modified_base 75: mod_base = OTHER; note = 2'-O-Methyl-adenosine
  modified_base 76: mod_base = OTHER; note = 2'-O-Methyl-adenosine
  modified_base 77: mod_base = OTHER; note = 2'-O-Methyl-adenosine
  modified_base 78: mod_base = OTHER; note = 2'-O-Methyl-adenosine
  modified_base 79: mod_base = OTHER; note = 2'-O-Methyl-guanosine
  modified_base 80: mod_base = OTHER; note = 2'-O-Methyl-uridine
  modified_base 82: mod_base = OTHER; note = 2'-O-Methyl-guanosine
  modified_base 83: mod_base = OTHER; note = 2'-O-Methyl-cytidine
  modified_base 84: mod_base = OTHER; note = 2'-O-Methyl-adenosine
  modified_base 85: mod_base = OTHER; note = 2'-O-Methyl-cytidine
  modified_base 86: mod_base = OTHER; note = 2'-O-Methyl-cytidine
  modified_base 87: mod_base = OTHER; note = 2'-O-Methyl-guanosine
  modified_base 89: mod_base = OTHER; note = 2'-O-Methyl-guanosine
  modified_base 92: mod_base = OTHER; note = 2'-O-Methyl-guanosine
  modified_base 93: mod_base = OTHER; note = 2'-O-Methyl-guanosine
  modified_base 94: mod_base = OTHER; note = 2'-O-Methyl-uridine
  modified_base 95: mod_base = OTHER; note = 2'-O-Methyl-guanosine
  modified_base 96: mod_base = OTHER; note = 2'-O-Methyl-cytidine
  modified_base 97: mod_base = OTHER; note = 2'-O-Methyl-uridine
  modified_base 98: mod_base = OTHER; note = 2'-O-Methyl-uridine phosphorothioate
  modified_base 99: mod_base = OTHER; note = 2'-O-Methyl-uridine phosphorothioate
  modified_base 100: mod_base = OTHER; note = 2'-O-Methyl-uridine

SEQ ID NO: 2657 - RNA, 103 nt, synthetic construct; identical to SEQ ID NO: 1700
  source 1..103: mol_type = other RNA
  modified_base 1: mod_base = OTHER; note = 2'-O-Methyl-cytidine phosphorothioate
  modified_base 2: mod_base = OTHER; note = 2'-O-Methyl-adenosine phosphorothioate
  modified_base 3: mod_base = OTHER; note = 2'-O-Methyl-guanosine phosphorothioate
  modified_base 21: mod_base = OTHER; note = 2'-O-Methyl-guanosine
  modified_base 25: mod_base = OTHER; note = uridine phosphorothioate
  modified_base 28: mod_base = OTHER; note = 2'-O-Methyl-adenosine
  modified_base 29: mod_base = OTHER; note = 2'-O-Methyl-guanosine
  modified_base 30: mod_base = OTHER; note = 2'-O-Methyl-cytidine
  modified_base 31: mod_base = OTHER; note = 2'-O-Methyl-uridine
  modified_base 32: mod_base = OTHER; note = 2'-O-Methyl-adenosine
  modified_base 33: mod_base = OTHER; note = 2'-O-Methyl-guanosine
  modified_base 34: mod_base = OTHER; note = 2'-O-Methyl-adenosine
  modified_base 35: mod_base = OTHER; note = 2'-O-Methyl-adenosine
  modified_base 36: mod_base = OTHER; note = 2'-O-Methyl-adenosine
  modified_base 37: mod_base = OTHER; note = 2'-O-Methyl-uridine
  modified_base 38: mod_base = OTHER; note = 2'-O-Methyl-adenosine
  modified_base 39: mod_base = OTHER; note = 2'-O-Methyl-guanosine
  modified_base 40: mod_base = OTHER; note = 2'-O-Methyl-cytidine
  modified_base 41: mod_base = OTHER; note = 2'-O-Methyl-adenosine
  modified_base 42: mod_base = OTHER; note = 2'-O-Methyl-adenosine
  modified_base 46: mod_base = OTHER; note = 2'-O-Methyl-adenosine
  modified_base 48: mod_base = OTHER; note = 2'-O-Methyl-adenosine
  modified_base 50: mod_base = OTHER; note = 2'-O-Methyl-uridine
  modified_base 52: mod_base = OTHER; note = 2'-O-Methyl-adenosine
  modified_base 53: mod_base = OTHER; note = 2'-O-Methyl-guanosine
  modified_base 54: mod_base = OTHER; note = 2'-O-Methyl-guanosine
  modified_base 55: mod_base = OTHER; note = 2'-O-Methyl-cytidine
  modified_base 56: mod_base = OTHER; note = 2'-O-Methyl-uridine
  modified_base 57: mod_base = OTHER; note = 2'-O-Methyl-adenosine
  modified_base 60: mod_base = OTHER; note = 2'-O-Methyl-cytidine
  modified_base 61: mod_base = OTHER; note = 2'-O-Methyl-cytidine
  modified_base 64: mod_base = OTHER; note = uridine phosphorothioate
  modified_base 66: mod_base = OTHER; note = 2'-O-Methyl-uridine
  modified_base 67: mod_base = OTHER; note = 2'-O-Methyl-cytidine
  modified_base 70: mod_base = OTHER; note = 2'-O-Methyl-cytidine
  modified_base 71: mod_base = OTHER; note = 2'-O-Methyl-uridine
  modified_base 72: mod_base = OTHER; note = 2'-O-Methyl-uridine
  modified_base 74: mod_base = OTHER; note = 2'-O-Methyl-adenosine
  modified_base 75: mod_base = OTHER; note = 2'-O-Methyl-adenosine
  modified_base 76: mod_base = OTHER; note = 2'-O-Methyl-adenosine
  modified_base 77: mod_base = OTHER; note = 2'-O-Methyl-adenosine
  modified_base 78: mod_base = OTHER; note = 2'-O-Methyl-adenosine
  modified_base 79: mod_base = OTHER; note = 2'-O-Methyl-guanosine
  modified_base 80: mod_base = OTHER; note = 2'-O-Methyl-uridine
  modified_base 82: mod_base = OTHER; note = 2'-O-Methyl-guanosine
  modified_base 83: mod_base = OTHER; note = 2'-O-Methyl-cytidine
  modified_base 84: mod_base = OTHER; note = 2'-O-Methyl-adenosine
  modified_base 85: mod_base = OTHER; note = 2'-O-Methyl-cytidine
  modified_base 86: mod_base = OTHER; note = 2'-O-Methyl-cytidine
  modified_base 87: mod_base = OTHER; note = 2'-O-Methyl-guanosine
  modified_base 89: mod_base = OTHER; note = 2'-O-Methyl-guanosine
  modified_base 92: mod_base = OTHER; note = 2'-O-Methyl-guanosine
  modified_base 93: mod_base = OTHER; note = 2'-O-Methyl-guanosine
  modified_base 94: mod_base = OTHER; note = 2'-O-Methyl-uridine
  modified_base 95: mod_base = OTHER; note = 2'-O-Methyl-guanosine
  modified_base 96: mod_base = OTHER; note = 2'-O-Methyl-cytidine
  modified_base 97: mod_base = OTHER; note = 2'-O-Methyl-uridine
  modified_base 98: mod_base = OTHER; note = 2'-O-Methyl-uridine phosphorothioate
  modified_base 99: mod_base = OTHER; note = 2'-O-Methyl-uridine phosphorothioate
  modified_base 100: mod_base = OTHER; note = 2'-O-Methyl-uridine

SEQ ID NO: 2658 - RNA, 103 nt, synthetic construct; identical to SEQ ID NO: 1700
  source 1..103: mol_type = other RNA
  modified_base 1: mod_base = OTHER; note = 2'-O-Methyl-cytidine phosphorothioate
  modified_base 2: mod_base = OTHER; note = 2'-O-Methyl-adenosine phosphorothioate
  modified_base 3: mod_base = OTHER; note = 2'-O-Methyl-guanosine phosphorothioate
  modified_base 21: mod_base = OTHER; note = 2'-O-Methyl-guanosine
  modified_base 25: mod_base = OTHER; note = uridine phosphorothioate
  modified_base 28: mod_base = OTHER; note = 2'-O-Methyl-adenosine
  modified_base 29: mod_base = OTHER; note = 2'-O-Methyl-guanosine
  modified_base 30: mod_base = OTHER; note = 2'-O-Methyl-cytidine
  modified_base 31: mod_base = OTHER; note = 2'-O-Methyl-uridine
  modified_base 32: mod_base = OTHER; note = 2'-O-Methyl-adenosine
  modified_base 33: mod_base = OTHER; note = 2'-O-Methyl-guanosine
  modified_base 34: mod_base = OTHER; note = 2'-O-Methyl-adenosine
  modified_base 35: mod_base = OTHER; note = 2'-O-Methyl-adenosine
  modified_base 36: mod_base = OTHER; note = 2'-O-Methyl-adenosine
  modified_base 37: mod_base = OTHER; note = 2'-O-Methyl-uridine
  modified_base 38: mod_base = OTHER; note = 2'-O-Methyl-adenosine
  modified_base 39: mod_base = OTHER; note = 2'-O-Methyl-guanosine
  modified_base 40: mod_base = OTHER; note = 2'-O-Methyl-cytidine
  modified_base 41: mod_base = OTHER; note = 2'-O-Methyl-adenosine
  modified_base 42: mod_base = OTHER; note = 2'-O-Methyl-adenosine
  modified_base 46: mod_base = OTHER; note = 2'-O-Methyl-adenosine
  modified_base 48: mod_base = OTHER; note = 2'-O-Methyl-adenosine
  modified_base 50: mod_base = OTHER; note = 2'-O-Methyl-uridine
  modified_base 52: mod_base = OTHER; note = 2'-O-Methyl-adenosine
  modified_base 53: mod_base = OTHER; note = 2'-O-Methyl-guanosine
  modified_base 54: mod_base = OTHER; note = 2'-O-Methyl-guanosine
  modified_base 57: mod_base = OTHER; note = 2'-O-Methyl-adenosine
  modified_base 61: mod_base = OTHER; note = 2'-O-Methyl-cytidine
  modified_base 64: mod_base = OTHER; note = uridine phosphorothioate
  modified_base 66: mod_base = OTHER; note = 2'-O-Methyl-uridine
  modified_base 67: mod_base = OTHER; note = 2'-O-Methyl-cytidine
  modified_base 70: mod_base = OTHER; note = 2'-O-Methyl-cytidine
  modified_base 71: mod_base = OTHER; note = 2'-O-Methyl-uridine
  modified_base 72: mod_base = OTHER; note = 2'-O-Methyl-uridine
  modified_base 73: mod_base = OTHER; note = 2'-O-Methyl-guanosine
  modified_base 74: mod_base = OTHER; note = 2'-O-Methyl-adenosine
  modified_base 75: mod_base = OTHER; note = 2'-O-Methyl-adenosine
  modified_base 76: mod_base = OTHER; note = 2'-O-Methyl-adenosine
  modified_base 77: mod_base = OTHER; note = 2'-O-Methyl-adenosine
  modified_base 78: mod_base = OTHER; note = 2'-O-Methyl-adenosine
  modified_base 79: mod_base = OTHER; note = 2'-O-Methyl-guanosine
  modified_base 80: mod_base = OTHER; note = 2'-O-Methyl-uridine
  modified_base 82: mod_base = OTHER; note = 2'-O-Methyl-guanosine
  modified_base 83: mod_base = OTHER; note = 2'-O-Methyl-cytidine
  modified_base 84: mod_base = OTHER; note = 2'-O-Methyl-adenosine
  modified_base 85: mod_base = OTHER; note = 2'-O-Methyl-cytidine
  modified_base 86: mod_base = OTHER; note = 2'-O-Methyl-cytidine
  modified_base 87: mod_base = OTHER; note = 2'-O-Methyl-guanosine
  modified_base 89: mod_base = OTHER; note = 2'-O-Methyl-guanosine
  modified_base 92: mod_base = OTHER; note = 2'-O-Methyl-guanosine
  modified_base 93: mod_base = OTHER; note = 2'-O-Methyl-guanosine
  modified_base 94: mod_base = OTHER; note = 2'-O-Methyl-uridine
  modified_base 95: mod_base = OTHER; note = 2'-O-Methyl-guanosine
  modified_base 96: mod_base = OTHER; note = 2'-O-Methyl-cytidine
  modified_base 97: mod_base = OTHER; note = 2'-O-Methyl-uridine
  modified_base 98: mod_base = OTHER; note = 2'-O-Methyl-uridine phosphorothioate
  modified_base 99: mod_base = OTHER; note = 2'-O-Methyl-uridine phosphorothioate
  modified_base 100: mod_base = OTHER; note = 2'-O-Methyl-uridine

SEQ ID NO: 2659 - RNA, 103 nt, synthetic construct; identical to SEQ ID NO: 1700
  source 1..103: mol_type = other RNA
  modified_base 1: mod_base = OTHER; note = 2'-O-Methyl-cytidine phosphorothioate
  modified_base 2: mod_base = OTHER; note = 2'-O-Methyl-adenosine phosphorothioate
  modified_base 3: mod_base = OTHER; note = 2'-O-Methyl-guanosine phosphorothioate
  modified_base 21: mod_base = OTHER; note = 2'-O-Methyl-guanosine
  modified_base 25: mod_base = OTHER; note = uridine phosphorothioate
  modified_base 28: mod_base = OTHER; note = 2'-O-Methyl-adenosine
  modified_base 29: mod_base = OTHER; note = 2'-O-Methyl-guanosine
  modified_base 30: mod_base = OTHER; note = 2'-O-Methyl-cytidine
  modified_base 31: mod_base = OTHER; note = 2'-O-Methyl-uridine
  modified_base 32: mod_base = OTHER; note = 2'-O-Methyl-adenosine
  modified_base 33: mod_base = OTHER; note = 2'-O-Methyl-guanosine
  modified_base 34: mod_base = OTHER; note = 2'-O-Methyl-adenosine
  modified_base 35: mod_base = OTHER; note = 2'-O-Methyl-adenosine
  modified_base 36: mod_base = OTHER; note = 2'-O-Methyl-adenosine
  modified_base 37: mod_base = OTHER; note = 2'-O-Methyl-uridine
  modified_base 38: mod_base = OTHER; note = 2'-O-Methyl-adenosine
  modified_base 39: mod_base = OTHER; note = 2'-O-Methyl-guanosine
  modified_base 40: mod_base = OTHER; note = 2'-O-Methyl-cytidine
  modified_base 41: mod_base = OTHER; note = 2'-O-Methyl-adenosine
  modified_base 42: mod_base = OTHER; note = 2'-O-Methyl-adenosine
  modified_base 46: mod_base = OTHER; note = 2'-O-Methyl-adenosine
  modified_base 48: mod_base = OTHER; note = 2'-O-Methyl-adenosine
  modified_base 50: mod_base = OTHER; note = 2'-O-Methyl-uridine
  modified_base 52: mod_base = OTHER; note = 2'-O-Methyl-adenosine
  modified_base 53: mod_base = OTHER; note = 2'-O-Methyl-guanosine
  modified_base 54: mod_base = OTHER; note = 2'-O-Methyl-guanosine
  modified_base 57: mod_base = OTHER; note = 2'-O-Methyl-adenosine
  modified_base 61: mod_base = OTHER; note = 2'-O-Methyl-cytidine
  modified_base 64: mod_base = OTHER; note = uridine phosphorothioate
  modified_base 66: mod_base = OTHER; note = 2'-O-Methyl-uridine
  modified_base 67: mod_base = OTHER; note = 2'-O-Methyl-cytidine
  modified_base 70: mod_base = OTHER; note = 2'-O-Methyl-cytidine
  modified_base 71: mod_base = OTHER; note = 2'-O-Methyl-uridine
  modified_base 72: mod_base = OTHER; note = 2'-O-Methyl-uridine
  modified_base 73: mod_base = OTHER; note = 2'-O-Methyl-guanosine
  modified_base 74: mod_base = OTHER; note = 2'-O-Methyl-adenosine
  modified_base 75: mod_base = OTHER; note = 2'-O-Methyl-adenosine
  modified_base 76: mod_base = OTHER; note = 2'-O-Methyl-adenosine
  modified_base 77: mod_base = OTHER; note = 2'-O-Methyl-adenosine
  modified_base 78: mod_base = OTHER; note = 2'-O-Methyl-adenosine
  modified_base 79: mod_base = OTHER; note = 2'-O-Methyl-guanosine
  modified_base 80: mod_base = OTHER; note = 2'-O-Methyl-uridine
  modified_base 82: mod_base = OTHER; note = 2'-O-Methyl-guanosine
  modified_base 83: mod_base = OTHER; note = 2'-O-Methyl-cytidine
  modified_base 84: mod_base = OTHER; note = 2'-O-Methyl-adenosine
  modified_base 85: mod_base = OTHER; note = 2'-O-Methyl-cytidine
  modified_base 86: mod_base = OTHER; note = 2'-O-Methyl-cytidine
  modified_base 87: mod_base = OTHER; note = 2'-O-Methyl-guanosine
  modified_base 89: mod_base = OTHER; note = 2'-O-Methyl-guanosine
  modified_base 91: mod_base = OTHER; note = 2'-O-Methyl-cytidine
  modified_base 92: mod_base = OTHER; note = 2'-O-Methyl-guanosine
  modified_base 93: mod_base = OTHER; note = 2'-O-Methyl-guanosine
  modified_base 94: mod_base = OTHER; note = 2'-O-Methyl-uridine
  modified_base 95: mod_base = OTHER; note = 2'-O-Methyl-guanosine
  modified_base 96: mod_base = OTHER; note = 2'-O-Methyl-cytidine
  modified_base 97: mod_base = OTHER; note = 2'-O-Methyl-uridine
  modified_base 98: mod_base = OTHER; note = 2'-O-Methyl-uridine phosphorothioate
  modified_base 99: mod_base = OTHER; note = 2'-O-Methyl-uridine phosphorothioate
  modified_base 100: mod_base = OTHER; note = 2'-O-Methyl-uridine

SEQ ID NO: 2660 - RNA, 103 nt, synthetic construct; identical to SEQ ID NO: 1700
  source 1..103: mol_type = other RNA
  modified_base 1: mod_base = OTHER; note = 2'-O-Methyl-cytidine phosphorothioate
  modified_base 2: mod_base = OTHER; note = 2'-O-Methyl-adenosine phosphorothioate
  modified_base 3: mod_base = OTHER; note = 2'-O-Methyl-guanosine phosphorothioate
  modified_base 21: mod_base = OTHER; note = 2'-O-Methyl-guanosine
  modified_base 25: mod_base = OTHER; note = uridine phosphorothioate
  modified_base 28: mod_base = OTHER; note = 2'-O-Methyl-adenosine
  modified_base 29: mod_base = OTHER; note = 2'-O-Methyl-guanosine
  modified_base 30: mod_base = OTHER; note = 2'-O-Methyl-cytidine
  modified_base 31: mod_base = OTHER; note = 2'-O-Methyl-uridine
  modified_base 32: mod_base = OTHER; note = 2'-O-Methyl-adenosine
  modified_base 34: mod_base = OTHER; note = 2'-O-Methyl-adenosine
  modified_base 35: mod_base = OTHER; note = 2'-O-Methyl-adenosine
  modified_base 36: mod_base = OTHER; note = 2'-O-Methyl-adenosine
  modified_base 37: mod_base = OTHER; note = 2'-O-Methyl-uridine
  modified_base 38: mod_base = OTHER; note = 2'-O-Methyl-adenosine
  modified_base 39: mod_base = OTHER; note = 2'-O-Methyl-guanosine
  modified_base 40: mod_base = OTHER; note = 2'-O-Methyl-cytidine
  modified_base 41: mod_base = OTHER; note = 2'-O-Methyl-adenosine
  modified_base 42: mod_base = OTHER; note = 2'-O-Methyl-adenosine
  modified_base 46: mod_base = OTHER; note = 2'-O-Methyl-adenosine
  modified_base 48: mod_base = OTHER; note = 2'-O-Methyl-adenosine
  modified_base 50: mod_base = OTHER; note = 2'-O-Methyl-uridine
  modified_base 52: mod_base = OTHER; note = 2'-O-Methyl-adenosine
  modified_base 53: mod_base = OTHER; note = 2'-O-Methyl-guanosine
  modified_base 54: mod_base = OTHER; note = 2'-O-Methyl-guanosine
  modified_base 57: mod_base = OTHER; note = 2'-O-Methyl-adenosine
  modified_base 61: mod_base = OTHER; note = 2'-O-Methyl-cytidine
  modified_base 64: mod_base = OTHER; note = uridine phosphorothioate
  modified_base 66: mod_base = OTHER; note = 2'-O-Methyl-uridine
  modified_base 67: mod_base = OTHER; note = 2'-O-Methyl-cytidine
  modified_base 70: mod_base = OTHER; note = 2'-O-Methyl-cytidine
  modified_base 71: mod_base = OTHER; note = 2'-O-Methyl-uridine
  modified_base 72: mod_base = OTHER; note = 2'-O-Methyl-uridine
  modified_base 73: mod_base = OTHER; note = 2'-O-Methyl-guanosine
  modified_base 74: mod_base = OTHER; note = 2'-O-Methyl-adenosine
  modified_base 75: mod_base = OTHER; note = 2'-O-Methyl-adenosine
  modified_base 76: mod_base = OTHER; note = 2'-O-Methyl-adenosine
  modified_base 77: mod_base = OTHER; note = 2'-O-Methyl-adenosine
  modified_base 78: mod_base = OTHER; note = 2'-O-Methyl-adenosine
  modified_base 79: mod_base = OTHER; note = 2'-O-Methyl-guanosine
  modified_base 80: mod_base = OTHER; note = 2'-O-Methyl-uridine
  modified_base 82: mod_base = OTHER; note = 2'-O-Methyl-guanosine
  modified_base 83: mod_base = OTHER; note = 2'-O-Methyl-cytidine
  modified_base 84: mod_base = OTHER; note = 2'-O-Methyl-adenosine
  modified_base 85: mod_base = OTHER; note = 2'-O-Methyl-cytidine
  modified_base 86: mod_base = OTHER; note = 2'-O-Methyl-cytidine
  modified_base 87: mod_base = OTHER; note = 2'-O-Methyl-guanosine
  modified_base 89: mod_base = OTHER; note = 2'-O-Methyl-guanosine
  modified_base 92: mod_base = OTHER; note = 2'-O-Methyl-guanosine
  modified_base 93: mod_base = OTHER; note = 2'-O-Methyl-guanosine
  modified_base 94: mod_base = OTHER; note = 2'-O-Methyl-uridine
  modified_base 95: mod_base = OTHER; note = 2'-O-Methyl-guanosine
  modified_base 96: mod_base = OTHER; note = 2'-O-Methyl-cytidine
  modified_base 97: mod_base = OTHER; note = 2'-O-Methyl-uridine
  modified_base 98: mod_base = OTHER; note = 2'-O-Methyl-uridine phosphorothioate
  modified_base 99: mod_base = OTHER; note = 2'-O-Methyl-uridine phosphorothioate
  modified_base 100: mod_base = OTHER; note = 2'-O-Methyl-uridine

SEQ ID NO: 2661 - RNA, 103 nt, synthetic construct; identical to SEQ ID NO: 1700
  source 1..103: mol_type = other RNA
  modified_base 1: mod_base = OTHER; note = 2'-O-Methyl-cytidine phosphorothioate
  modified_base 2: mod_base = OTHER; note = 2'-O-Methyl-adenosine phosphorothioate
  modified_base 3: mod_base = OTHER; note = 2'-O-Methyl-guanosine phosphorothioate
  modified_base 21: mod_base = OTHER; note = 2'-O-Methyl-guanosine
  modified_base 25: mod_base = OTHER; note = uridine phosphorothioate
  modified_base 28: mod_base = OTHER; note = 2'-O-Methyl-adenosine
  modified_base 29: mod_base = OTHER; note = 2'-O-Methyl-guanosine
  modified_base 30: mod_base = OTHER; note = 2'-O-Methyl-cytidine
  modified_base 31: mod_base = OTHER; note = 2'-O-Methyl-uridine
  modified_base 32: mod_base = OTHER; note = 2'-O-Methyl-adenosine
  modified_base 34: mod_base = OTHER; note = 2'-O-Methyl-adenosine
  modified_base 35: mod_base = OTHER; note = 2'-O-Methyl-adenosine
  modified_base 36: mod_base = OTHER; note = 2'-O-Methyl-adenosine
  modified_base 37: mod_base = OTHER; note = 2'-O-Methyl-uridine
  modified_base 38: mod_base = OTHER; note = 2'-O-Methyl-adenosine
  modified_base 39: mod_base = OTHER; note = 2'-O-Methyl-guanosine
  modified_base 40: mod_base = OTHER; note = 2'-O-Methyl-cytidine
  modified_base 41: mod_base = OTHER; note = 2'-O-Methyl-adenosine
  modified_base 42: mod_base = OTHER; note = 2'-O-Methyl-adenosine
  modified_base 46: mod_base = OTHER; note = 2'-O-Methyl-adenosine
  modified_base 48: mod_base = OTHER; note = 2'-O-Methyl-adenosine
  modified_base 50: mod_base = OTHER; note = 2'-O-Methyl-uridine
  modified_base 52: mod_base = OTHER; note = 2'-O-Methyl-adenosine
  modified_base 53: mod_base = OTHER; note = 2'-O-Methyl-guanosine
  modified_base 54: mod_base = OTHER; note = 2'-O-Methyl-guanosine
  modified_base 57: mod_base = OTHER; note = 2'-O-Methyl-adenosine
  modified_base 61: mod_base = OTHER; note = 2'-O-Methyl-cytidine
  modified_base 64: mod_base = OTHER; note = uridine phosphorothioate
  modified_base 66: mod_base = OTHER; note = 2'-O-Methyl-uridine
  modified_base 67: mod_base = OTHER; note = 2'-O-Methyl-cytidine
  modified_base 70: mod_base = OTHER; note = 2'-O-Methyl-cytidine
  modified_base 71: mod_base = OTHER; note = 2'-O-Methyl-uridine
  modified_base 72: mod_base = OTHER; note = 2'-O-Methyl-uridine
  modified_base 73: mod_base = OTHER; note = 2'-O-Methyl-guanosine
  modified_base 74: mod_base = OTHER; note = 2'-O-Methyl-adenosine
  modified_base 75: mod_base = OTHER; note = 2'-O-Methyl-adenosine
  modified_base 76: mod_base = OTHER; note = 2'-O-Methyl-adenosine
  modified_base 77: mod_base = OTHER; note = 2'-O-Methyl-adenosine
  modified_base 78: mod_base = OTHER; note = 2'-O-Methyl-adenosine
  modified_base 79: mod_base = OTHER; note = 2'-O-Methyl-guanosine
  modified_base 80: mod_base = OTHER; note = 2'-O-Methyl-uridine
  modified_base 82: mod_base = OTHER; note = 2'-O-Methyl-guanosine
  modified_base 83: mod_base = OTHER; note = 2'-O-Methyl-cytidine
  modified_base 84: mod_base = OTHER; note = 2'-O-Methyl-adenosine
  modified_base 85: mod_base = OTHER; note = 2'-O-Methyl-cytidine
  modified_base 86: mod_base = OTHER; note = 2'-O-Methyl-cytidine
  modified_base 87: mod_base = OTHER; note = 2'-O-Methyl-guanosine
  modified_base 89: mod_base = OTHER; note = 2'-O-Methyl-guanosine
  modified_base 91: mod_base = OTHER; note = 2'-O-Methyl-cytidine
  modified_base 92: mod_base = OTHER; note = 2'-O-Methyl-guanosine
  modified_base 93: mod_base = OTHER; note = 2'-O-Methyl-guanosine
  modified_base 94: mod_base = OTHER; note = 2'-O-Methyl-uridine
  modified_base 95: mod_base = OTHER; note = 2'-O-Methyl-guanosine
  modified_base 96: mod_base = OTHER; note = 2'-O-Methyl-cytidine
  modified_base 97: mod_base = OTHER; note = 2'-O-Methyl-uridine
  modified_base 98: mod_base = OTHER; note = 2'-O-Methyl-uridine phosphorothioate
  modified_base 99: mod_base = OTHER; note = 2'-O-Methyl-uridine phosphorothioate
  modified_base 100: mod_base = OTHER; note = 2'-O-Methyl-uridine

SEQ ID NO: 2662 - RNA, 103 nt, synthetic construct; identical to SEQ ID NO: 1700
  source 1..103: mol_type = other RNA
  modified_base 1: mod_base = OTHER; note = 2'-O-Methyl-cytidine phosphorothioate
  modified_base 2: mod_base = OTHER; note = 2'-O-Methyl-adenosine phosphorothioate
  modified_base 3: mod_base = OTHER; note = 2'-O-Methyl-guanosine phosphorothioate
  modified_base 21: mod_base = OTHER; note = 2'-O-Methyl-guanosine
  modified_base 25: mod_base = OTHER; note = uridine phosphorothioate
  modified_base 28: mod_base = OTHER; note = 2'-O-Methyl-adenosine
  modified_base 29: mod_base = OTHER; note = 2'-O-Methyl-guanosine
  modified_base 30: mod_base = OTHER; note = 2'-O-Methyl-cytidine
  modified_base 31: mod_base = OTHER; note = 2'-O-Methyl-uridine
  modified_base 32: mod_base = OTHER; note = 2'-O-Methyl-adenosine
  modified_base 34: mod_base = OTHER; note = 2'-O-Methyl-adenosine
  modified_base 35: mod_base = OTHER; note = 2'-O-Methyl-adenosine
  modified_base 36: mod_base = OTHER; note = 2'-O-Methyl-adenosine
  modified_base 37: mod_base = OTHER; note = 2'-O-Methyl-uridine
  modified_base 38: mod_base = OTHER; note = 2'-O-Methyl-adenosine
  modified_base 39: mod_base = OTHER; note = 2'-O-Methyl-guanosine
  modified_base 40: mod_base = OTHER; note = 2'-O-Methyl-cytidine
  modified_base 41: mod_base = OTHER; note = 2'-O-Methyl-adenosine
  modified_base 42: mod_base = OTHER; note = 2'-O-Methyl-adenosine
  modified_base 46: mod_base = OTHER; note = 2'-O-Methyl-adenosine
  modified_base 48: mod_base = OTHER; note = 2'-O-Methyl-adenosine
  modified_base 50: mod_base = OTHER; note = 2'-O-Methyl-uridine
  modified_base 52: mod_base = OTHER; note = 2'-O-Methyl-adenosine
  modified_base 53: mod_base = OTHER; note = 2'-O-Methyl-guanosine
  modified_base 54: mod_base = OTHER; note = 2'-O-Methyl-guanosine
  modified_base 55: mod_base = OTHER; note = 2'-O-Methyl-cytidine
  modified_base 56: mod_base = OTHER; note = 2'-O-Methyl-uridine
  modified_base 57: mod_base = OTHER; note = 2'-O-Methyl-adenosine
  modified_base 60: mod_base = OTHER; note = 2'-O-Methyl-cytidine
  modified_base 61: mod_base = OTHER; note = 2'-O-Methyl-cytidine
  modified_base 64: mod_base = OTHER; note = uridine phosphorothioate
  modified_base 66: mod_base = OTHER; note = 2'-O-Methyl-uridine
  modified_base 67: mod_base = OTHER; note = 2'-O-Methyl-cytidine
  modified_base 70: mod_base = OTHER; note = 2'-O-Methyl-cytidine
  modified_base 71: mod_base = OTHER; note = 2'-O-Methyl-uridine
  modified_base 72: mod_base = OTHER; note = 2'-O-Methyl-uridine
  modified_base 74: mod_base = OTHER; note = 2'-O-Methyl-adenosine
  modified_base 75: mod_base = OTHER; note = 2'-O-Methyl-adenosine
  modified_base 76: mod_base = OTHER; note = 2'-O-Methyl-adenosine
  modified_base 77: mod_base = OTHER; note = 2'-O-Methyl-adenosine
  modified_base 78: mod_base = OTHER; note = 2'-O-Methyl-adenosine
  modified_base 79: mod_base = OTHER; note = 2'-O-Methyl-guanosine
  modified_base 80: mod_base = OTHER; note = 2'-O-Methyl-uridine
  modified_base 82: mod_base = OTHER; note = 2'-O-Methyl-guanosine
  modified_base 83: mod_base = OTHER; note = 2'-O-Methyl-cytidine
  modified_base 84: mod_base = OTHER; note = 2'-O-Methyl-adenosine
  modified_base 85: mod_base = OTHER; note = 2'-O-Methyl-cytidine
  modified_base 86: mod_base = OTHER; note = 2'-O-Methyl-cytidine
  modified_base 87: mod_base = OTHER; note = 2'-O-Methyl-guanosine
  modified_base 89: mod_base = OTHER; note = 2'-O-Methyl-guanosine
  modified_base 92: mod_base = OTHER; note = 2'-O-Methyl-guanosine
  modified_base 93: mod_base = OTHER; note = 2'-O-Methyl-guanosine
  modified_base 94: mod_base = OTHER; note = 2'-O-Methyl-uridine
  modified_base 95: mod_base = OTHER; note = 2'-O-Methyl-guanosine
  modified_base 96: mod_base = OTHER; note = 2'-O-Methyl-cytidine
  modified_base 97: mod_base = OTHER; note = 2'-O-Methyl-uridine
  modified_base 98: mod_base = OTHER; note = 2'-O-Methyl-uridine phosphorothioate
  modified_base 99: mod_base = OTHER; note = 2'-O-Methyl-uridine phosphorothioate
  modified_base 100: mod_base = OTHER; note = 2'-O-Methyl-uridine

SEQ ID NO: 2663 - RNA, 103 nt, synthetic construct; identical to SEQ ID NO: 1643
  source 1..103: mol_type = other RNA
  modified_base 1: mod_base = OTHER; note = 2'-O-Methyl-cytidine phosphorothioate
  modified_base 2: mod_base = OTHER; note = 2'-O-Methyl-cytidine phosphorothioate
  modified_base 3: mod_base = OTHER; note = 2'-O-Methyl-cytidine phosphorothioate
  modified_base 21: mod_base = OTHER; note = 2'-O-Methyl-guanosine
  modified_base 25: mod_base = OTHER; note = uridine phosphorothioate
  modified_base 28: mod_base = OTHER; note = 2'-O-Methyl-adenosine
  modified_base 29: mod_base = OTHER; note = 2'-O-Methyl-guanosine
  modified_base 30: mod_base = OTHER; note = 2'-O-Methyl-cytidine
  modified_base 31: mod_base = OTHER; note = 2'-O-Methyl-uridine
  modified_base 32: mod_base = OTHER; note = 2'-O-Methyl-adenosine
  modified_base 33: mod_base = OTHER; note = 2'-O-Methyl-guanosine
  modified_base 34: mod_base = OTHER; note = 2'-O-Methyl-adenosine
  modified_base 35: mod_base = OTHER; note = 2'-O-Methyl-adenosine
  modified_base 36: mod_base = OTHER; note = 2'-O-Methyl-adenosine
  modified_base 37: mod_base = OTHER; note = 2'-O-Methyl-uridine
  modified_base 38: mod_base = OTHER; note = 2'-O-Methyl-adenosine
  modified_base 39: mod_base = OTHER; note = 2'-O-Methyl-guanosine
  modified_base 40: mod_base = OTHER; note = 2'-O-Methyl-cytidine
  modified_base 41: mod_base = OTHER; note = 2'-O-Methyl-adenosine
  modified_base 42: mod_base = OTHER; note = 2'-O-Methyl-adenosine
  modified_base 45: mod_base = OTHER; note = uridine phosphorothioate
  modified_base 46: mod_base = OTHER; note = 2'-O-Methyl-adenosine
  modified_base 48: mod_base = OTHER; note = 2'-O-Methyl-adenosine
  modified_base 50: mod_base = OTHER; note = 2'-O-Methyl-uridine
  modified_base 52: mod_base = OTHER; note = 2'-O-Methyl-adenosine
  modified_base 53: mod_base = OTHER; note = 2'-O-Methyl-guanosine
  modified_base 54: mod_base = OTHER; note = 2'-O-Methyl-guanosine
  modified_base 55: mod_base = OTHER; note = 2'-O-Methyl-cytidine
  modified_base 56: mod_base = OTHER; note = 2'-O-Methyl-uridine
  modified_base 57: mod_base = OTHER; note = 2'-O-Methyl-adenosine
  modified_base 60: mod_base = OTHER; note = 2'-O-Methyl-cytidine
  modified_base 61: mod_base = OTHER; note = 2'-O-Methyl-cytidine
  modified_base 64: mod_base = OTHER; note = uridine phosphorothioate
  modified_base 66: mod_base = OTHER; note = 2'-O-Methyl-uridine
  modified_base 67: mod_base = OTHER; note = 2'-O-Methyl-cytidine
  modified_base 70: mod_base = OTHER; note = 2'-O-Methyl-cytidine
  modified_base 71: mod_base = OTHER; note = 2'-O-Methyl-uridine
  modified_base 72: mod_base = OTHER; note = 2'-O-Methyl-uridine
  modified_base 73: mod_base = OTHER; note = 2'-O-Methyl-guanosine
  modified_base 74: mod_base = OTHER; note = 2'-O-Methyl-adenosine
  modified_base 75: mod_base = OTHER; note = 2'-O-Methyl-adenosine
  modified_base 76: mod_base = OTHER; note = 2'-O-Methyl-adenosine
  modified_base 77: mod_base = OTHER; note = 2'-O-Methyl-adenosine
  modified_base 78: mod_base = OTHER; note = 2'-O-Methyl-adenosine
  modified_base 79: mod_base = OTHER; note = 2'-O-Methyl-guanosine
  modified_base 80: mod_base = OTHER; note = 2'-O-Methyl-uridine
  modified_base 81: mod_base = OTHER; note = 2'-O-Methyl-guanosine
  modified_base 83: mod_base = OTHER; note = 2'-O-Methyl-cytidine
  modified_base 84: mod_base = OTHER; note = 2'-O-Methyl-adenosine
  modified_base 85: mod_base = OTHER; note = 2'-O-Methyl-cytidine
  modified_base 86: mod_base = OTHER; note = 2'-O-Methyl-cytidine
  modified_base 87: mod_base = OTHER; note = 2'-O-Methyl-guanosine
  modified_base 88: mod_base = OTHER; note = 2'-O-Methyl-adenosine
  modified_base 89: mod_base = OTHER; note = 2'-O-Methyl-guanosine
  modified_base 90: mod_base = OTHER; note = 2'-O-Methyl-uridine
  modified_base 91: mod_base = OTHER; note = 2'-O-Methyl-cytidine
  modified_base 92: mod_base = OTHER; note = 2'-O-Methyl-guanosine
  modified_base 93: mod_base = OTHER; note = 2'-O-Methyl-guanosine
  modified_base 94: mod_base = OTHER; note = 2'-O-Methyl-uridine
  modified_base 95: mod_base = OTHER; note = 2'-O-Methyl-guanosine
  modified_base 96: mod_base = OTHER; note = 2'-O-Methyl-cytidine
  modified_base 97: mod_base = OTHER; note = 2'-O-Methyl-uridine
  modified_base 98: mod_base = OTHER; note = 2'-O-Methyl-uridine phosphorothioate
  modified_base 99: mod_base = OTHER; note = 2'-O-Methyl-uridine phosphorothioate
  modified_base 100: mod_base = OTHER; note = 2'-O-Methyl-uridine

SEQ ID NO: 2664 - RNA, 103 nt, synthetic construct; identical to SEQ ID NO: 1643
  source 1..103: mol_type = other RNA
  modified_base 1: mod_base = OTHER; note = 2'-O-Methyl-cytidine phosphorothioate
  modified_base 2: mod_base = OTHER; note = 2'-O-Methyl-cytidine phosphorothioate
  modified_base 3: mod_base = OTHER; note = 2'-O-Methyl-cytidine phosphorothioate
  modified_base 21: mod_base = OTHER; note = 2'-O-Methyl-guanosine
  modified_base 25: mod_base = OTHER; note = uridine phosphorothioate
  modified_base 28: mod_base = OTHER; note = 2'-O-Methyl-adenosine
  modified_base 29: mod_base = OTHER; note = 2'-O-Methyl-guanosine
  modified_base 30: mod_base = OTHER; note = 2'-O-Methyl-cytidine
  modified_base 31: mod_base = OTHER; note = 2'-O-Methyl-uridine
  modified_base 32: mod_base = OTHER; note = 2'-O-Methyl-adenosine
  modified_base 34: mod_base = OTHER; note = 2'-O-Methyl-adenosine
  modified_base 35: mod_base = OTHER; note = 2'-O-Methyl-adenosine
  modified_base 36: mod_base = OTHER; note = 2'-O-Methyl-adenosine
  modified_base 37: mod_base = OTHER; note = 2'-O-Methyl-uridine
  modified_base 38: mod_base = OTHER; note = 2'-O-Methyl-adenosine
  modified_base 39: mod_base = OTHER; note = 2'-O-Methyl-guanosine
  modified_base 40: mod_base = OTHER; note = 2'-O-Methyl-cytidine
  modified_base 41: mod_base = OTHER; note = 2'-O-Methyl-adenosine
  modified_base 42: mod_base = OTHER; note = 2'-O-Methyl-adenosine
  modified_base 45: mod_base = OTHER; note = uridine phosphorothioate
  modified_base 46: mod_base = OTHER; note = 2'-O-Methyl-adenosine
  modified_base 48: mod_base = OTHER; note = 2'-O-Methyl-adenosine
  modified_base 50: mod_base = OTHER; note = 2'-O-Methyl-uridine
  modified_base 52: mod_base = OTHER; note = 2'-O-Methyl-adenosine
  modified_base 53: mod_base = OTHER; note = 2'-O-Methyl-guanosine
  modified_base 54: mod_base = OTHER; note = 2'-O-Methyl-guanosine
  modified_base 55: mod_base = OTHER; note = 2'-O-Methyl-cytidine
  modified_base 56: mod_base = OTHER; note = 2'-O-Methyl-uridine
  modified_base 57: mod_base = OTHER; note = 2'-O-Methyl-adenosine
  modified_base 60: mod_base = OTHER; note = 2'-O-Methyl-cytidine
  modified_base 61: mod_base = OTHER; note = 2'-O-Methyl-cytidine
  modified_base 64: mod_base = OTHER; note = uridine phosphorothioate
  modified_base 66: mod_base = OTHER; note = 2'-O-Methyl-uridine
  modified_base 67: mod_base = OTHER; note = 2'-O-Methyl-cytidine
  modified_base 70: mod_base = OTHER; note = 2'-O-Methyl-cytidine
  modified_base 71: mod_base = OTHER; note = 2'-O-Methyl-uridine
  modified_base 72: mod_base = OTHER; note = 2'-O-Methyl-uridine
  modified_base 74: mod_base = OTHER; note = 2'-O-Methyl-adenosine
  modified_base 75: mod_base = OTHER; note = 2'-O-Methyl-adenosine
  modified_base 76: mod_base = OTHER; note = 2'-O-Methyl-adenosine
  modified_base 77: mod_base = OTHER; note = 2'-O-Methyl-adenosine
  modified_base 78: mod_base = OTHER; note = 2'-O-Methyl-adenosine
  modified_base 79: mod_base = OTHER; note = 2'-O-Methyl-guanosine
  modified_base 80: mod_base = OTHER; note = 2'-O-Methyl-uridine
  modified_base 81: mod_base = OTHER; note = 2'-O-Methyl-guanosine
  modified_base 83: mod_base = OTHER; note = 2'-O-Methyl-cytidine
  modified_base 84: mod_base = OTHER; note = 2'-O-Methyl-adenosine
  modified_base 85: mod_base = OTHER; note = 2'-O-Methyl-cytidine
  modified_base 86: mod_base = OTHER; note = 2'-O-Methyl-cytidine
  modified_base 87: mod_base = OTHER; note = 2'-O-Methyl-guanosine
  modified_base 88: mod_base = OTHER; note = 2'-O-Methyl-adenosine
  modified_base 89: mod_base = OTHER; note = 2'-O-Methyl-guanosine
  modified_base 90: mod_base = OTHER; note = 2'-O-Methyl-uridine
  modified_base 91: mod_base = OTHER; note = 2'-O-Methyl-cytidine
  modified_base 92: mod_base = OTHER; note = 2'-O-Methyl-guanosine
  modified_base 93: mod_base = OTHER; note = 2'-O-Methyl-guanosine
  modified_base 94: mod_base = OTHER; note = 2'-O-Methyl-uridine
  modified_base 95: mod_base = OTHER; note = 2'-O-Methyl-guanosine
  modified_base 96: mod_base = OTHER; note = 2'-O-Methyl-cytidine
  modified_base 97: mod_base = OTHER; note = 2'-O-Methyl-uridine
  modified_base 98: mod_base = OTHER; note = 2'-O-Methyl-uridine phosphorothioate
  modified_base 99: mod_base = OTHER; note = 2'-O-Methyl-uridine phosphorothioate
  modified_base 100: mod_base = OTHER; note = 2'-O-Methyl-uridine

SEQ ID NO: 2665 - RNA, 103 nt, synthetic construct; identical to SEQ ID NO: 1699
  source 1..103: mol_type = other RNA
  modified_base 1: mod_base = OTHER; note = 2'-O-Methyl-guanosine phosphorothioate
  modified_base 2: mod_base = OTHER; note = 2'-O-Methyl-adenosine phosphorothioate
  modified_base 3: mod_base = OTHER; note = 2'-O-Methyl-guanosine phosphorothioate
  modified_base 21: mod_base = OTHER; note = 2'-O-Methyl-guanosine
  modified_base 25: mod_base = OTHER; note = uridine phosphorothioate
  modified_base 28: mod_base = OTHER; note = 2'-O-Methyl-adenosine
  modified_base 29: mod_base = OTHER; note = 2'-O-Methyl-guanosine
  modified_base 30: mod_base = OTHER; note = 2'-O-Methyl-cytidine
  modified_base 31: mod_base = OTHER; note = 2'-O-Methyl-uridine
  modified_base 32: mod_base = OTHER; note = 2'-O-Methyl-adenosine
  modified_base 33: mod_base = OTHER; note = 2'-O-Methyl-guanosine
  modified_base 34: mod_base = OTHER; note = 2'-O-Methyl-adenosine
  modified_base 35: mod_base = OTHER; note = 2'-O-Methyl-adenosine
  modified_base 36: mod_base = OTHER; note = 2'-O-Methyl-adenosine
  modified_base 37: mod_base = OTHER; note = 2'-O-Methyl-uridine
  modified_base 38: mod_base = OTHER; note = 2'-O-Methyl-adenosine
  modified_base 39: mod_base = OTHER; note = 2'-O-Methyl-guanosine
  modified_base 40: mod_base = OTHER; note = 2'-O-Methyl-cytidine
  modified_base 41: mod_base = OTHER; note = 2'-O-Methyl-adenosine
  modified_base 42: mod_base = OTHER; note = 2'-O-Methyl-adenosine
  modified_base 45: mod_base = OTHER; note = uridine phosphorothioate
  modified_base 46: mod_base = OTHER; note = 2'-O-Methyl-adenosine
  modified_base 48: mod_base = OTHER; note = 2'-O-Methyl-adenosine
  modified_base 50: mod_base = OTHER; note = 2'-O-Methyl-uridine
  modified_base 52: mod_base = OTHER; note = 2'-O-Methyl-adenosine
  modified_base 53: mod_base = OTHER; note = 2'-O-Methyl-guanosine
  modified_base 54: mod_base = OTHER; note = 2'-O-Methyl-guanosine
  modified_base 55: mod_base = OTHER; note = 2'-O-Methyl-cytidine
  modified_base 56: mod_base = OTHER; note = 2'-O-Methyl-uridine
  modified_base 57: mod_base = OTHER; note = 2'-O-Methyl-adenosine
  modified_base 60: mod_base = OTHER; note = 2'-O-Methyl-cytidine
  modified_base 61: mod_base = OTHER; note = 2'-O-Methyl-cytidine
  modified_base 64: mod_base = OTHER; note = uridine phosphorothioate
  modified_base 66: mod_base = OTHER; note = 2'-O-Methyl-uridine
  modified_base 67: mod_base = OTHER; note = 2'-O-Methyl-cytidine
  modified_base 70: mod_base = OTHER; note = 2'-O-Methyl-cytidine
  modified_base 71: mod_base = OTHER; note = 2'-O-Methyl-uridine
  modified_base 72: mod_base = OTHER; note = 2'-O-Methyl-uridine
  modified_base 73: mod_base = OTHER; note = 2'-O-Methyl-guanosine
  modified_base 74: mod_base = OTHER; note = 2'-O-Methyl-adenosine
  modified_base 75: mod_base = OTHER; note = 2'-O-Methyl-adenosine
  modified_base 76: mod_base = OTHER; note = 2'-O-Methyl-adenosine
  modified_base 77: mod_base = OTHER; note = 2'-O-Methyl-adenosine
  modified_base 78: mod_base = OTHER; note = 2'-O-Methyl-adenosine
  modified_base 79: mod_base = OTHER; note = 2'-O-Methyl-guanosine
  modified_base 80: mod_base = OTHER; note = 2'-O-Methyl-uridine
  modified_base 81: mod_base = OTHER; note = 2'-O-Methyl-guanosine
  modified_base 83: mod_base = OTHER; note = 2'-O-Methyl-cytidine
  modified_base 84: mod_base = OTHER; note = 2'-O-Methyl-adenosine
  modified_base 85: mod_base = OTHER; note = 2'-O-Methyl-cytidine
  modified_base 86: mod_base = OTHER; note = 2'-O-Methyl-cytidine
  modified_base 87: mod_base = OTHER; note = 2'-O-Methyl-guanosine
  modified_base 88: mod_base = OTHER; note = 2'-O-Methyl-adenosine
  modified_base 89: mod_base = OTHER; note = 2'-O-Methyl-guanosine
  modified_base 90: mod_base = OTHER; note = 2'-O-Methyl-uridine
  modified_base 91: mod_base = OTHER; note = 2'-O-Methyl-cytidine
  modified_base 92: mod_base = OTHER; note = 2'-O-Methyl-guanosine
  modified_base 93: mod_base = OTHER; note = 2'-O-Methyl-guanosine
  modified_base 94: mod_base = OTHER; note = 2'-O-Methyl-uridine
  modified_base 95: mod_base = OTHER; note = 2'-O-Methyl-guanosine
  modified_base 96: mod_base = OTHER; note = 2'-O-Methyl-cytidine
  modified_base 97: mod_base = OTHER; note = 2'-O-Methyl-uridine
  modified_base 98: mod_base = OTHER; note = 2'-O-Methyl-uridine phosphorothioate
  modified_base 99: mod_base = OTHER; note = 2'-O-Methyl-uridine phosphorothioate
  modified_base 100: mod_base = OTHER; note = 2'-O-Methyl-uridine

SEQ ID NO: 2666 - RNA, 103 nt, synthetic construct; identical to SEQ ID NO: 1699
  source 1..103: mol_type = other RNA
  modified_base 1: mod_base = OTHER; note = 2'-O-Methyl-guanosine phosphorothioate
  modified_base 2: mod_base = OTHER; note = 2'-O-Methyl-adenosine phosphorothioate
  modified_base 3: mod_base = OTHER; note = 2'-O-Methyl-guanosine phosphorothioate
  modified_base 21: mod_base = OTHER; note = 2'-O-Methyl-guanosine
  modified_base 25: mod_base = OTHER; note = uridine phosphorothioate
  modified_base 28: mod_base = OTHER; note = 2'-O-Methyl-adenosine
  modified_base 29: mod_base = OTHER; note = 2'-O-Methyl-guanosine
  modified_base 30: mod_base = OTHER; note = 2'-O-Methyl-cytidine
  modified_base 31: mod_base = OTHER; note = 2'-O-Methyl-uridine
  modified_base 32: mod_base = OTHER; note = 2'-O-Methyl-adenosine
  modified_base 34: mod_base = OTHER; note = 2'-O-Methyl-adenosine
  modified_base 35: mod_base = OTHER; note = 2'-O-Methyl-adenosine
  modified_base 36: mod_base = OTHER; note = 2'-O-Methyl-adenosine
  modified_base 37: mod_base = OTHER; note = 2'-O-Methyl-uridine
  modified_base 38: mod_base = OTHER; note = 2'-O-Methyl-adenosine
  modified_base 39: mod_base = OTHER; note = 2'-O-Methyl-guanosine
  modified_base 40: mod_base = OTHER; note = 2'-O-Methyl-cytidine
  modified_base 41: mod_base = OTHER; note = 2'-O-Methyl-adenosine
  modified_base 42: mod_base = OTHER; note = 2'-O-Methyl-adenosine
  modified_base 45: mod_base = OTHER; note = uridine phosphorothioate
  modified_base 46: mod_base = OTHER; note = 2'-O-Methyl-adenosine
  modified_base 48: mod_base = OTHER; note = 2'-O-Methyl-adenosine
  modified_base 50: mod_base = OTHER; note = 2'-O-Methyl-uridine
  modified_base 52: mod_base = OTHER; note = 2'-O-Methyl-adenosine
  modified_base 53: mod_base = OTHER; note = 2'-O-Methyl-guanosine
  modified_base 54: mod_base = OTHER; note = 2'-O-Methyl-guanosine
  modified_base 55: mod_base = OTHER; note = 2'-O-Methyl-cytidine
  modified_base 56: mod_base = OTHER; note = 2'-O-Methyl-uridine
  modified_base 57: mod_base = OTHER; note = 2'-O-Methyl-adenosine
  modified_base 60: mod_base = OTHER; note = 2'-O-Methyl-cytidine
  modified_base 61: mod_base = OTHER; note = 2'-O-Methyl-cytidine
  modified_base 64: mod_base = OTHER; note = uridine phosphorothioate
  modified_base 66: mod_base = OTHER; note = 2'-O-Methyl-uridine
  modified_base 67: mod_base = OTHER; note = 2'-O-Methyl-cytidine
  modified_base 70: mod_base = OTHER; note = 2'-O-Methyl-cytidine
  modified_base 71: mod_base = OTHER; note = 2'-O-Methyl-uridine
  modified_base 72: mod_base = OTHER; note = 2'-O-Methyl-uridine
  modified_base 74: mod_base = OTHER; note = 2'-O-Methyl-adenosine
  modified_base 75: mod_base = OTHER; note = 2'-O-Methyl-adenosine
  modified_base 76: mod_base = OTHER; note = 2'-O-Methyl-adenosine
  modified_base 77: mod_base = OTHER; note = 2'-O-Methyl-adenosine
  modified_base 78: mod_base = OTHER; note = 2'-O-Methyl-adenosine
  modified_base 79: mod_base = OTHER; note = 2'-O-Methyl-guanosine
  modified_base 80: mod_base = OTHER; note = 2'-O-Methyl-uridine
  modified_base 81: mod_base = OTHER; note = 2'-O-Methyl-guanosine
  modified_base 83: mod_base = OTHER; note = 2'-O-Methyl-cytidine
  modified_base 84: mod_base = OTHER; note = 2'-O-Methyl-adenosine
  modified_base 85: mod_base = OTHER; note = 2'-O-Methyl-cytidine
  modified_base 86: mod_base = OTHER; note = 2'-O-Methyl-cytidine
  modified_base 87: mod_base = OTHER; note = 2'-O-Methyl-guanosine
  modified_base 88: mod_base = OTHER; note = 2'-O-Methyl-adenosine
  modified_base 89: mod_base = OTHER; note = 2'-O-Methyl-guanosine
  modified_base 90: mod_base = OTHER; note = 2'-O-Methyl-uridine
  modified_base 91: mod_base = OTHER; note = 2'-O-Methyl-cytidine
  modified_base 92: mod_base = OTHER; note = 2'-O-Methyl-guanosine
  modified_base 93: mod_base = OTHER; note = 2'-O-Methyl-guanosine
  modified_base 94: mod_base = OTHER; note = 2'-O-Methyl-uridine
  modified_base 95: mod_base = OTHER; note = 2'-O-Methyl-guanosine
  modified_base 96: mod_base = OTHER; note = 2'-O-Methyl-cytidine
  modified_base 97: mod_base = OTHER; note = 2'-O-Methyl-uridine
  modified_base 98: mod_base = OTHER; note = 2'-O-Methyl-uridine phosphorothioate
  modified_base 99: mod_base = OTHER; note = 2'-O-Methyl-uridine phosphorothioate
  modified_base 100: mod_base = OTHER; note = 2'-O-Methyl-uridine

SEQ ID NO: 2667 - RNA, 103 nt, synthetic construct; identical to SEQ ID NO: 1700
  source 1..103: mol_type = other RNA
  modified_base 1: mod_base = OTHER; note = 2'-O-Methyl-cytidine phosphorothioate
  modified_base 2: mod_base = OTHER; note = 2'-O-Methyl-adenosine phosphorothioate
  modified_base 3: mod_base = OTHER; note = 2'-O-Methyl-guanosine phosphorothioate
  modified_base 21: mod_base = OTHER; note = 2'-O-Methyl-guanosine
  modified_base 25: mod_base = OTHER; note = uridine phosphorothioate
  modified_base 28: mod_base = OTHER; note = 2'-O-Methyl-adenosine
  modified_base 29: mod_base = OTHER; note = 2'-O-Methyl-guanosine
  modified_base 30: mod_base = OTHER; note = 2'-O-Methyl-cytidine
  modified_base 31: mod_base = OTHER; note = 2'-O-Methyl-uridine
  modified_base 32: mod_base = OTHER; note = 2'-O-Methyl-adenosine
  modified_base 33: mod_base = OTHER; note = 2'-O-Methyl-guanosine
  modified_base 34: mod_base = OTHER; note = 2'-O-Methyl-adenosine
  modified_base 35: mod_base = OTHER; note = 2'-O-Methyl-adenosine
  modified_base 36: mod_base = OTHER; note = 2'-O-Methyl-adenosine
  modified_base 37: mod_base = OTHER; note = 2'-O-Methyl-uridine
  modified_base 38: mod_base = OTHER; note = 2'-O-Methyl-adenosine
  modified_base 39: mod_base = OTHER; note = 2'-O-Methyl-guanosine
  modified_base 40: mod_base = OTHER; note = 2'-O-Methyl-cytidine
  modified_base 41: mod_base = OTHER; note = 2'-O-Methyl-adenosine
  modified_base 42: mod_base = OTHER; note = 2'-O-Methyl-adenosine
  modified_base 45: mod_base = OTHER; note = uridine phosphorothioate
  modified_base 46: mod_base = OTHER; note = 2'-O-Methyl-adenosine
  modified_base 48: mod_base = OTHER; note = 2'-O-Methyl-adenosine
  modified_base 50: mod_base = OTHER; note = 2'-O-Methyl-uridine
  modified_base 52: mod_base = OTHER; note = 2'-O-Methyl-adenosine
  modified_base 53: mod_base = OTHER; note = 2'-O-Methyl-guanosine
  modified_base 54: mod_base = OTHER; note = 2'-O-Methyl-guanosine
  modified_base 57: mod_base = OTHER; note = 2'-O-Methyl-adenosine
  modified_base 61: mod_base = OTHER; note = 2'-O-Methyl-cytidine
  modified_base 64: mod_base = OTHER; note = uridine phosphorothioate
  modified_base 66: mod_base = OTHER; note = 2'-O-Methyl-uridine
  modified_base 67: mod_base = OTHER; note = 2'-O-Methyl-cytidine
  modified_base 70: mod_base = OTHER; note = 2'-O-Methyl-cytidine
  modified_base 71: mod_base = OTHER; note = 2'-O-Methyl-uridine
  modified_base 72: mod_base = OTHER; note = 2'-O-Methyl-uridine
  modified_base 74: mod_base = OTHER; note = 2'-O-Methyl-adenosine
  modified_base 75: mod_base = OTHER; note = 2'-O-Methyl-adenosine
  modified_base 76: mod_base = OTHER; note = 2'-O-Methyl-adenosine
  modified_base 77: mod_base = OTHER; note = 2'-O-Methyl-adenosine
  modified_base 78: mod_base = OTHER; note = 2'-O-Methyl-adenosine
  modified_base 79: mod_base = OTHER; note = 2'-O-Methyl-guanosine
  modified_base 80: mod_base = OTHER; note = 2'-O-Methyl-uridine
  modified_base 82: mod_base = OTHER; note = 2'-O-Methyl-guanosine
  modified_base 83: mod_base = OTHER; note = 2'-O-Methyl-cytidine
  modified_base 84: mod_base = OTHER; note = 2'-O-Methyl-adenosine
  modified_base 85: mod_base = OTHER; note = 2'-O-Methyl-cytidine
  modified_base 86: mod_base = OTHER; note = 2'-O-Methyl-cytidine
  modified_base 87: mod_base = OTHER; note = 2'-O-Methyl-guanosine
  modified_base 89: mod_base = OTHER; note = 2'-O-Methyl-guanosine
  modified_base 92: mod_base = OTHER; note = 2'-O-Methyl-guanosine
  modified_base 93: mod_base = OTHER; note = 2'-O-Methyl-guanosine
  modified_base 94: mod_base = OTHER; note = 2'-O-Methyl-uridine
  modified_base 95: mod_base = OTHER; note = 2'-O-Methyl-guanosine
  modified_base 96: mod_base = OTHER; note = 2'-O-Methyl-cytidine
  modified_base 97: mod_base = OTHER; note = 2'-O-Methyl-uridine
  modified_base 98: mod_base = OTHER; note = 2'-O-Methyl-uridine phosphorothioate
  modified_base 99: mod_base = OTHER; note = 2'-O-Methyl-uridine phosphorothioate
  modified_base 100: mod_base = OTHER; note = 2'-O-Methyl-uridine

SEQ ID NO: 2668 - RNA, 103 nt, synthetic construct; identical to SEQ ID NO: 1700
  source 1..103: mol_type = other RNA
  modified_base 1: mod_base = OTHER; note = 2'-O-Methyl-cytidine phosphorothioate
  modified_base 2: mod_base = OTHER; note = 2'-O-Methyl-adenosine phosphorothioate
  modified_base 3: mod_base = OTHER; note = 2'-O-Methyl-guanosine phosphorothioate
  modified_base 21: mod_base = OTHER; note = 2'-O-Methyl-guanosine
  modified_base 25: mod_base = OTHER; note = uridine phosphorothioate
  modified_base 28: mod_base = OTHER; note = 2'-O-Methyl-adenosine
  modified_base 29: mod_base = OTHER; note = 2'-O-Methyl-guanosine
  modified_base 30: mod_base = OTHER; note = 2'-O-Methyl-cytidine
  modified_base 31: mod_base = OTHER; note = 2'-O-Methyl-uridine
  modified_base 32: mod_base = OTHER; note = 2'-O-Methyl-adenosine
  modified_base 33: mod_base = OTHER; note = 2'-O-Methyl-guanosine
  modified_base 34: mod_base = OTHER; note = 2'-O-Methyl-adenosine
  modified_base 35: mod_base = OTHER; note = 2'-O-Methyl-adenosine
  modified_base 36: mod_base = OTHER; note = 2'-O-Methyl-adenosine
  modified_base 37: mod_base = OTHER; note = 2'-O-Methyl-uridine
  modified_base 38: mod_base = OTHER; note = 2'-O-Methyl-adenosine
  modified_base 39: mod_base = OTHER; note = 2'-O-Methyl-guanosine
  modified_base 40: mod_base = OTHER; note = 2'-O-Methyl-cytidine
  modified_base 41: mod_base = OTHER; note = 2'-O-Methyl-adenosine
  modified_base 42: mod_base = OTHER; note = 2'-O-Methyl-adenosine
  modified_base 45: mod_base = OTHER; note = uridine phosphorothioate
  modified_base 46: mod_base = OTHER; note = 2'-O-Methyl-adenosine
  modified_base 48: mod_base = OTHER; note = 2'-O-Methyl-adenosine
  modified_base 50: mod_base = OTHER; note = 2'-O-Methyl-uridine
  modified_base 52: mod_base = OTHER; note = 2'-O-Methyl-adenosine
  modified_base 53: mod_base = OTHER; note = 2'-O-Methyl-guanosine
  modified_base 54: mod_base = OTHER; note = 2'-O-Methyl-guanosine
  modified_base 55: mod_base = OTHER; note = 2'-O-Methyl-cytidine
  modified_base 56: mod_base = OTHER; note = 2'-O-Methyl-uridine
  modified_base 57: mod_base = OTHER; note = 2'-O-Methyl-adenosine
  modified_base 60: mod_base = OTHER; note = 2'-O-Methyl-cytidine
  modified_base 61: mod_base = OTHER; note = 2'-O-Methyl-cytidine
  modified_base 64: mod_base = OTHER; note = uridine phosphorothioate
  modified_base 66: mod_base = OTHER; note = 2'-O-Methyl-uridine
  modified_base 67: mod_base = OTHER; note = 2'-O-Methyl-cytidine
  modified_base 70: mod_base = OTHER; note = 2'-O-Methyl-cytidine
  modified_base 71: mod_base = OTHER; note = 2'-O-Methyl-uridine
  modified_base 72: mod_base = OTHER; note = 2'-O-Methyl-uridine
  modified_base 74: mod_base = OTHER; note = 2'-O-Methyl-adenosine
  modified_base 75: mod_base = OTHER; note = 2'-O-Methyl-adenosine
  modified_base 76: mod_base = OTHER; note = 2'-O-Methyl-adenosine
  modified_base 77: mod_base = OTHER; note = 2'-O-Methyl-adenosine
  modified_base 78: mod_base = OTHER; note = 2'-O-Methyl-adenosine
  modified_base 79: mod_base = OTHER; note = 2'-O-Methyl-guanosine
  modified_base 80: mod_base = OTHER; note = 2'-O-Methyl-uridine
  modified_base 82: mod_base = OTHER; note = 2'-O-Methyl-guanosine
  modified_base 83: mod_base = OTHER; note = 2'-O-Methyl-cytidine
  modified_base 84: mod_base = OTHER; note = 2'-O-Methyl-adenosine
  modified_base 85: mod_base = OTHER; note = 2'-O-Methyl-cytidine
  modified_base 86: mod_base = OTHER; note = 2'-O-Methyl-cytidine
  modified_base 87: mod_base = OTHER; note = 2'-O-Methyl-guanosine
  modified_base 89: mod_base = OTHER; note = 2'-O-Methyl-guanosine
  modified_base 92: mod_base = OTHER; note = 2'-O-Methyl-guanosine
  modified_base 93: mod_base = OTHER; note = 2'-O-Methyl-guanosine
  modified_base 94: mod_base = OTHER; note = 2'-O-Methyl-uridine
  modified_base 95: mod_base = OTHER; note = 2'-O-Methyl-guanosine
  modified_base 96: mod_base = OTHER; note = 2'-O-Methyl-cytidine
  modified_base 97: mod_base = OTHER; note = 2'-O-Methyl-uridine
  modified_base 98: mod_base = OTHER; note = 2'-O-Methyl-uridine phosphorothioate
  modified_base 99: mod_base = OTHER; note = 2'-O-Methyl-uridine phosphorothioate
  modified_base 100: mod_base = OTHER; note = 2'-O-Methyl-uridine

SEQ ID NO: 2669 - RNA, 103 nt, synthetic construct; identical to SEQ ID NO: 1700
  source 1..103: mol_type = other RNA
  modified_base 1: mod_base = OTHER; note = 2'-O-Methyl-cytidine phosphorothioate
  modified_base 2: mod_base = OTHER; note = 2'-O-Methyl-adenosine phosphorothioate
  modified_base 3: mod_base = OTHER; note = 2'-O-Methyl-guanosine phosphorothioate
  modified_base 21: mod_base = OTHER; note = 2'-O-Methyl-guanosine
  modified_base 25: mod_base = OTHER; note = uridine phosphorothioate
  modified_base 28: mod_base = OTHER; note = 2'-O-Methyl-adenosine
  modified_base 29: mod_base = OTHER; note = 2'-O-Methyl-guanosine
  modified_base 30: mod_base = OTHER; note = 2'-O-Methyl-cytidine
  modified_base 31: mod_base = OTHER; note = 2'-O-Methyl-uridine
  modified_base 32: mod_base = OTHER; note = 2'-O-Methyl-adenosine
  modified_base 33: mod_base = OTHER; note = 2'-O-Methyl-guanosine
  modified_base 34: mod_base = OTHER; note = 2'-O-Methyl-adenosine
  modified_base 35: mod_base = OTHER; note = 2'-O-Methyl-adenosine
  modified_base 36: mod_base = OTHER; note = 2'-O-Methyl-adenosine
  modified_base 37: mod_base = OTHER; note = 2'-O-Methyl-uridine
  modified_base 38: mod_base = OTHER; note = 2'-O-Methyl-adenosine
  modified_base 39: mod_base = OTHER; note = 2'-O-Methyl-guanosine
  modified_base 40: mod_base = OTHER; note = 2'-O-Methyl-cytidine
  modified_base 41: mod_base = OTHER; note = 2'-O-Methyl-adenosine
  modified_base 42: mod_base = OTHER; note = 2'-O-Methyl-adenosine
  modified_base 45: mod_base = OTHER; note = uridine phosphorothioate
  modified_base 46: mod_base = OTHER; note = 2'-O-Methyl-adenosine
  modified_base 48: mod_base = OTHER; note = 2'-O-Methyl-adenosine
  modified_base 50: mod_base = OTHER; note = 2'-O-Methyl-uridine
  modified_base 52: mod_base = OTHER; note = 2'-O-Methyl-adenosine
  modified_base 53: mod_base = OTHER; note = 2'-O-Methyl-guanosine
  modified_base 54: mod_base = OTHER; note = 2'-O-Methyl-guanosine
  modified_base 57: mod_base = OTHER; note = 2'-O-Methyl-adenosine
  modified_base 61: mod_base = OTHER; note = 2'-O-Methyl-cytidine
  modified_base 64: mod_base = OTHER; note = uridine phosphorothioate
  modified_base 66: mod_base = OTHER; note = 2'-O-Methyl-uridine
  modified_base 67: mod_base = OTHER; note = 2'-O-Methyl-cytidine
  modified_base 70: mod_base = OTHER; note = 2'-O-Methyl-cytidine
  modified_base 71: mod_base = OTHER; note = 2'-O-Methyl-uridine
  modified_base 72: mod_base = OTHER; note = 2'-O-Methyl-uridine
  modified_base 73: mod_base = OTHER; note = 2'-O-Methyl-guanosine
  modified_base 74: mod_base = OTHER; note = 2'-O-Methyl-adenosine
  modified_base 75: mod_base = OTHER; note = 2'-O-Methyl-adenosine
  modified_base 76: mod_base = OTHER; note = 2'-O-Methyl-adenosine
  modified_base 77: mod_base = OTHER; note = 2'-O-Methyl-adenosine
  modified_base 78: mod_base = OTHER; note = 2'-O-Methyl-adenosine
  modified_base 79: mod_base = OTHER; note = 2'-O-Methyl-guanosine
  modified_base 80: mod_base = OTHER; note = 2'-O-Methyl-uridine
  modified_base 82: mod_base = OTHER; note = 2'-O-Methyl-guanosine
  modified_base 83: mod_base = OTHER; note = 2'-O-Methyl-cytidine
  modified_base 84: mod_base = OTHER; note = 2'-O-Methyl-adenosine
  modified_base 85: mod_base = OTHER; note = 2'-O-Methyl-cytidine
  modified_base 86: mod_base = OTHER; note = 2'-O-Methyl-cytidine
  modified_base 87: mod_base = OTHER; note = 2'-O-Methyl-guanosine
  modified_base 89: mod_base = OTHER; note = 2'-O-Methyl-guanosine
  modified_base 92: mod_base = OTHER; note = 2'-O-Methyl-guanosine
  modified_base 93: mod_base = OTHER; note = 2'-O-Methyl-guanosine
  modified_base 94: mod_base = OTHER; note = 2'-O-Methyl-uridine
  modified_base 95: mod_base = OTHER; note = 2'-O-Methyl-guanosine
  modified_base 96: mod_base = OTHER; note = 2'-O-Methyl-cytidine
  modified_base 97: mod_base = OTHER; note = 2'-O-Methyl-uridine
  modified_base 98: mod_base = OTHER; note = 2'-O-Methyl-uridine phosphorothioate
  modified_base 99: mod_base = OTHER; note = 2'-O-Methyl-uridine phosphorothioate
  modified_base 100: mod_base = OTHER; note = 2'-O-Methyl-uridine

SEQ ID NO: 2670 - RNA, 103 nt, synthetic construct; identical to SEQ ID NO: 1700
  source 1..103: mol_type = other RNA
  modified_base 1: mod_base = OTHER; note = 2'-O-Methyl-cytidine phosphorothioate
  modified_base 2: mod_base = OTHER; note = 2'-O-Methyl-adenosine phosphorothioate
  modified_base 3: mod_base = OTHER; note = 2'-O-Methyl-guanosine phosphorothioate
  modified_base 21: mod_base = OTHER; note = 2'-O-Methyl-guanosine
  modified_base 25: mod_base = OTHER; note = uridine phosphorothioate
  modified_base 28: mod_base = OTHER; note = 2'-O-Methyl-adenosine
  modified_base 29: mod_base = OTHER; note = 2'-O-Methyl-guanosine
  modified_base 30: mod_base = OTHER; note = 2'-O-Methyl-cytidine
  modified_base 31: mod_base = OTHER; note = 2'-O-Methyl-uridine
  modified_base 32: mod_base = OTHER; note = 2'-O-Methyl-adenosine
  modified_base 33: mod_base = OTHER; note = 2'-O-Methyl-guanosine
  modified_base 34: mod_base = OTHER; note = 2'-O-Methyl-adenosine
  modified_base 35: mod_base = OTHER; note = 2'-O-Methyl-adenosine
  modified_base 36: mod_base = OTHER; note = 2'-O-Methyl-adenosine
  modified_base 37: mod_base = OTHER; note = 2'-O-Methyl-uridine
  modified_base 38: mod_base = OTHER; note = 2'-O-Methyl-adenosine
  modified_base 39: mod_base = OTHER; note = 2'-O-Methyl-guanosine
  modified_base 40: mod_base = OTHER; note = 2'-O-Methyl-cytidine
  modified_base 41: mod_base = OTHER; note = 2'-O-Methyl-adenosine
  modified_base 42: mod_base = OTHER; note = 2'-O-Methyl-adenosine
  modified_base 45: mod_base = OTHER; note = uridine phosphorothioate
  modified_base 46: mod_base = OTHER; note = 2'-O-Methyl-adenosine
  modified_base 48: mod_base = OTHER; note = 2'-O-Methyl-adenosine
  modified_base 50: mod_base = OTHER; note = 2'-O-Methyl-uridine
  modified_base 52: mod_base = OTHER; note = 2'-O-Methyl-adenosine
  modified_base 53: mod_base = OTHER; note = 2'-O-Methyl-guanosine
  modified_base 54: mod_base = OTHER; note = 2'-O-Methyl-guanosine
  modified_base 57: mod_base = OTHER; note = 2'-O-Methyl-adenosine
  modified_base 61: mod_base = OTHER; note = 2'-O-Methyl-cytidine
  modified_base 64: mod_base = OTHER; note = uridine phosphorothioate
  modified_base 66: mod_base = OTHER; note = 2'-O-Methyl-uridine
  modified_base 67: mod_base = OTHER; note = 2'-O-Methyl-cytidine
  modified_base 70: mod_base = OTHER; note = 2'-O-Methyl-cytidine
  modified_base 71: mod_base = OTHER; note = 2'-O-Methyl-uridine
  modified_base 72: mod_base = OTHER; note = 2'-O-Methyl-uridine
  modified_base 73: mod_base = OTHER; note = 2'-O-Methyl-guanosine
  modified_base 74: mod_base = OTHER; note = 2'-O-Methyl-adenosine
  modified_base 75: mod_base = OTHER; note = 2'-O-Methyl-adenosine
  modified_base 76: mod_base = OTHER; note = 2'-O-Methyl-adenosine
  modified_base 77: mod_base = OTHER; note = 2'-O-Methyl-adenosine
  modified_base 78: mod_base = OTHER; note = 2'-O-Methyl-adenosine
  modified_base 79: mod_base = OTHER; note = 2'-O-Methyl-guanosine
  modified_base 80: mod_base = OTHER; note = 2'-O-Methyl-uridine
  modified_base 82: mod_base = OTHER; note = 2'-O-Methyl-guanosine
  modified_base 83: mod_base = OTHER; note = 2'-O-Methyl-cytidine
  modified_base 84: mod_base = OTHER; note = 2'-O-Methyl-adenosine
  modified_base 85: mod_base = OTHER; note = 2'-O-Methyl-cytidine
  modified_base 86: mod_base = OTHER; note = 2'-O-Methyl-cytidine
  modified_base 87: mod_base = OTHER; note = 2'-O-Methyl-guanosine
  modified_base 89: mod_base = OTHER; note = 2'-O-Methyl-guanosine
  modified_base 91: mod_base = OTHER; note = 2'-O-Methyl-cytidine
  modified_base 92: mod_base = OTHER; note = 2'-O-Methyl-guanosine
  modified_base 93: mod_base = OTHER; note = 2'-O-Methyl-guanosine
  modified_base 94: mod_base = OTHER; note = 2'-O-Methyl-uridine
  modified_base 95: mod_base = OTHER; note = 2'-O-Methyl-guanosine
  modified_base 96: mod_base = OTHER; note = 2'-O-Methyl-cytidine
  modified_base 97: mod_base = OTHER; note = 2'-O-Methyl-uridine
  modified_base 98: mod_base = OTHER; note = 2'-O-Methyl-uridine phosphorothioate
  modified_base 99: mod_base = OTHER; note = 2'-O-Methyl-uridine phosphorothioate
  modified_base 100: mod_base = OTHER; note = 2'-O-Methyl-uridine

SEQ ID NO: 2671 - RNA, 103 nt, synthetic construct; identical to SEQ ID NO: 1700
  source 1..103: mol_type = other RNA
  modified_base 1: mod_base = OTHER; note = 2'-O-Methyl-cytidine phosphorothioate
  modified_base 2: mod_base = OTHER; note = 2'-O-Methyl-adenosine phosphorothioate
  modified_base 3: mod_base = OTHER; note = 2'-O-Methyl-guanosine phosphorothioate
  modified_base 21: mod_base = OTHER; note = 2'-O-Methyl-guanosine
  modified_base 25: mod_base = OTHER; note = uridine phosphorothioate
  modified_base 28: mod_base = OTHER; note = 2'-O-Methyl-adenosine
  modified_base 29: mod_base = OTHER; note = 2'-O-Methyl-guanosine
  modified_base 30: mod_base = OTHER; note = 2'-O-Methyl-cytidine
  modified_base 31: mod_base = OTHER; note = 2'-O-Methyl-uridine
  modified_base 32: mod_base = OTHER; note = 2'-O-Methyl-adenosine
  modified_base 34: mod_base = OTHER; note = 2'-O-Methyl-adenosine
  modified_base 35: mod_base = OTHER; note = 2'-O-Methyl-adenosine
  modified_base 36: mod_base = OTHER; note = 2'-O-Methyl-adenosine
  modified_base 37: mod_base = OTHER; note = 2'-O-Methyl-uridine
  modified_base 38: mod_base = OTHER; note = 2'-O-Methyl-adenosine
  modified_base 39: mod_base = OTHER; note = 2'-O-Methyl-guanosine
  modified_base 40: mod_base = OTHER; note = 2'-O-Methyl-cytidine
  modified_base 41: mod_base = OTHER; note = 2'-O-Methyl-adenosine
  modified_base 42: mod_base = OTHER; note = 2'-O-Methyl-adenosine
  modified_base 45: mod_base = OTHER; note = uridine phosphorothioate
  modified_base 46: mod_base = OTHER; note = 2'-O-Methyl-adenosine
  modified_base 48: mod_base = OTHER; note = 2'-O-Methyl-adenosine
  modified_base 50: mod_base = OTHER; note = 2'-O-Methyl-uridine
  modified_base 52: mod_base = OTHER; note = 2'-O-Methyl-adenosine
  modified_base 53: mod_base = OTHER; note = 2'-O-Methyl-guanosine
  modified_base 54: mod_base = OTHER; note = 2'-O-Methyl-guanosine
  modified_base 57: mod_base = OTHER; note = 2'-O-Methyl-adenosine
  modified_base 61: mod_base = OTHER; note = 2'-O-Methyl-cytidine
  modified_base 64: mod_base = OTHER; note = uridine phosphorothioate
  modified_base 66: mod_base = OTHER; note = 2'-O-Methyl-uridine
  modified_base 67: mod_base = OTHER; note = 2'-O-Methyl-cytidine
  modified_base 70: mod_base = OTHER; note = 2'-O-Methyl-cytidine
  modified_base 71: mod_base = OTHER; note = 2'-O-Methyl-uridine
  modified_base 72: mod_base = OTHER; note = 2'-O-Methyl-uridine
  modified_base 73: mod_base = OTHER; note = 2'-O-Methyl-guanosine
  modified_base 74: mod_base = OTHER; note = 2'-O-Methyl-adenosine
  modified_base 75: mod_base = OTHER; note = 2'-O-Methyl-adenosine
  modified_base 76: mod_base = OTHER; note = 2'-O-Methyl-adenosine
  modified_base 77: mod_base = OTHER; note = 2'-O-Methyl-adenosine
  modified_base 78: mod_base = OTHER; note = 2'-O-Methyl-adenosine
  modified_base 79: mod_base = OTHER; note = 2'-O-Methyl-guanosine
  modified_base 80: mod_base = OTHER; note = 2'-O-Methyl-uridine
  modified_base 82: mod_base = OTHER; note = 2'-O-Methyl-guanosine
  modified_base 83: mod_base = OTHER; note = 2'-O-Methyl-cytidine
  modified_base 84: mod_base = OTHER; note = 2'-O-Methyl-adenosine
  modified_base 85: mod_base = OTHER; note = 2'-O-Methyl-cytidine
  modified_base 86: mod_base = OTHER; note = 2'-O-Methyl-cytidine
  modified_base 87: mod_base = OTHER; note = 2'-O-Methyl-guanosine
  modified_base 89: mod_base = OTHER; note = 2'-O-Methyl-guanosine
  modified_base 92: mod_base = OTHER; note = 2'-O-Methyl-guanosine
  modified_base 93: mod_base = OTHER; note = 2'-O-Methyl-guanosine
  modified_base 94: mod_base = OTHER; note = 2'-O-Methyl-uridine
  modified_base 95: mod_base = OTHER; note = 2'-O-Methyl-guanosine
  modified_base 96: mod_base = OTHER; note = 2'-O-Methyl-cytidine
  modified_base 97: mod_base = OTHER; note = 2'-O-Methyl-uridine
  modified_base 98: mod_base = OTHER; note = 2'-O-Methyl-uridine phosphorothioate
  modified_base 99: mod_base = OTHER; note = 2'-O-Methyl-uridine phosphorothioate
  modified_base 100: mod_base = OTHER; note = 2'-O-Methyl-uridine

SEQ ID NO: 2672 - RNA, 103 nt, synthetic construct; identical to SEQ ID NO: 1700
  source 1..103: mol_type = other RNA
  modified_base 1: mod_base = OTHER; note = 2'-O-Methyl-cytidine phosphorothioate
  modified_base 2: mod_base = OTHER; note = 2'-O-Methyl-adenosine phosphorothioate
  modified_base 3: mod_base = OTHER; note = 2'-O-Methyl-guanosine phosphorothioate
  modified_base 21: mod_base = OTHER; note = 2'-O-Methyl-guanosine
  modified_base 25: mod_base = OTHER; note = uridine phosphorothioate
  modified_base 28: mod_base = OTHER; note = 2'-O-Methyl-adenosine
  modified_base 29: mod_base = OTHER; note = 2'-O-Methyl-guanosine
  modified_base 30: mod_base = OTHER; note = 2'-O-Methyl-cytidine
  modified_base 31: mod_base = OTHER; note = 2'-O-Methyl-uridine
  modified_base 32: mod_base = OTHER; note = 2'-O-Methyl-adenosine
  modified_base 34: mod_base = OTHER; note = 2'-O-Methyl-adenosine
  modified_base 35: mod_base = OTHER; note = 2'-O-Methyl-adenosine
  modified_base 36: mod_base = OTHER; note = 2'-O-Methyl-adenosine
  modified_base 37: mod_base = OTHER; note = 2'-O-Methyl-uridine
  modified_base 38: mod_base = OTHER; note = 2'-O-Methyl-adenosine
  modified_base 39: mod_base = OTHER; note = 2'-O-Methyl-guanosine
  modified_base 40: mod_base = OTHER; note = 2'-O-Methyl-cytidine
  modified_base 41: mod_base = OTHER; note = 2'-O-Methyl-adenosine
  modified_base 42: mod_base = OTHER; note = 2'-O-Methyl-adenosine
  modified_base 45: mod_base = OTHER; note = uridine phosphorothioate
  modified_base 46: mod_base = OTHER; note = 2'-O-Methyl-adenosine
  modified_base 48: mod_base = OTHER; note = 2'-O-Methyl-adenosine
  modified_base 50: mod_base = OTHER; note = 2'-O-Methyl-uridine
  modified_base 52: mod_base = OTHER; note = 2'-O-Methyl-adenosine
  modified_base 53: mod_base = OTHER; note = 2'-O-Methyl-guanosine
  modified_base 54: mod_base = OTHER; note = 2'-O-Methyl-guanosine
  modified_base 57: mod_base = OTHER; note = 2'-O-Methyl-adenosine
  modified_base 61: mod_base = OTHER; note = 2'-O-Methyl-cytidine
  modified_base 64: mod_base = OTHER; note = uridine phosphorothioate
  modified_base 66: mod_base = OTHER; note = 2'-O-Methyl-uridine
  modified_base 67: mod_base = OTHER; note = 2'-O-Methyl-cytidine
  modified_base 70: mod_base = OTHER; note = 2'-O-Methyl-cytidine
  modified_base 71: mod_base = OTHER; note = 2'-O-Methyl-uridine
  modified_base 72: mod_base = OTHER; note = 2'-O-Methyl-uridine
  modified_base 73: mod_base = OTHER; note = 2'-O-Methyl-guanosine
  modified_base 74: mod_base = OTHER; note = 2'-O-Methyl-adenosine
  modified_base 75: mod_base = OTHER; note = 2'-O-Methyl-adenosine
  modified_base 76: mod_base = OTHER; note = 2'-O-Methyl-adenosine
  modified_base 77: mod_base = OTHER; note = 2'-O-Methyl-adenosine
  modified_base 78: mod_base = OTHER; note = 2'-O-Methyl-adenosine
  modified_base 79: mod_base = OTHER; note = 2'-O-Methyl-guanosine
  modified_base 80: mod_base = OTHER; note = 2'-O-Methyl-uridine
  modified_base 82: mod_base = OTHER; note = 2'-O-Methyl-guanosine
  modified_base 83: mod_base = OTHER; note = 2'-O-Methyl-cytidine
  modified_base 84: mod_base = OTHER; note = 2'-O-Methyl-adenosine
  modified_base 85: mod_base = OTHER; note = 2'-O-Methyl-cytidine
  modified_base 86: mod_base = OTHER; note = 2'-O-Methyl-cytidine
  modified_base 87: mod_base = OTHER; note = 2'-O-Methyl-guanosine
  modified_base 89: mod_base = OTHER; note = 2'-O-Methyl-guanosine
  modified_base 91: mod_base = OTHER; note = 2'-O-Methyl-cytidine
  modified_base 92: mod_base = OTHER; note = 2'-O-Methyl-guanosine
  modified_base 93: mod_base = OTHER; note = 2'-O-Methyl-guanosine
  modified_base 94: mod_base = OTHER; note = 2'-O-Methyl-uridine
  modified_base 95: mod_base = OTHER; note = 2'-O-Methyl-guanosine
  modified_base 96: mod_base = OTHER; note = 2'-O-Methyl-cytidine
  modified_base 97: mod_base = OTHER; note = 2'-O-Methyl-uridine
  modified_base 98: mod_base = OTHER; note = 2'-O-Methyl-uridine phosphorothioate
  modified_base 99: mod_base = OTHER; note = 2'-O-Methyl-uridine phosphorothioate
  modified_base 100: mod_base = OTHER; note = 2'-O-Methyl-uridine

SEQ ID NO: 2673 - RNA, 103 nt, synthetic construct; identical to SEQ ID NO: 1700
  source 1..103: mol_type = other RNA
  modified_base 1: mod_base = OTHER; note = 2'-O-Methyl-cytidine phosphorothioate
  modified_base 2: mod_base = OTHER; note = 2'-O-Methyl-adenosine phosphorothioate
  modified_base 3: mod_base = OTHER; note = 2'-O-Methyl-guanosine phosphorothioate
  modified_base 21: mod_base = OTHER; note = 2'-O-Methyl-guanosine
  modified_base 25: mod_base = OTHER; note = uridine phosphorothioate
  modified_base 28: mod_base = OTHER; note = 2'-O-Methyl-adenosine
  modified_base 29: mod_base = OTHER; note = 2'-O-Methyl-guanosine
  modified_base 30: mod_base = OTHER; note = 2'-O-Methyl-cytidine
  modified_base 31: mod_base = OTHER; note = 2'-O-Methyl-uridine
  modified_base 32: mod_base = OTHER; note = 2'-O-Methyl-adenosine
  modified_base 34: mod_base = OTHER; note = 2'-O-Methyl-adenosine
  modified_base 35: mod_base = OTHER; note = 2'-O-Methyl-adenosine
  modified_base 36: mod_base = OTHER; note = 2'-O-Methyl-adenosine
  modified_base 37: mod_base = OTHER; note = 2'-O-Methyl-uridine
  modified_base 38: mod_base = OTHER; note = 2'-O-Methyl-adenosine
  modified_base 39: mod_base = OTHER; note = 2'-O-Methyl-guanosine
  modified_base 40: mod_base = OTHER; note = 2'-O-Methyl-cytidine
  modified_base 41: mod_base = OTHER; note = 2'-O-Methyl-adenosine
  modified_base 42: mod_base = OTHER; note = 2'-O-Methyl-adenosine
  modified_base 45: mod_base = OTHER; note = uridine phosphorothioate
  modified_base 46: mod_base = OTHER; note = 2'-O-Methyl-adenosine
  modified_base 48: mod_base = OTHER; note = 2'-O-Methyl-adenosine
  modified_base 50: mod_base = OTHER; note = 2'-O-Methyl-uridine
  modified_base 52: mod_base = OTHER; note = 2'-O-Methyl-adenosine
  modified_base 53: mod_base = OTHER; note = 2'-O-Methyl-guanosine
  modified_base 54: mod_base = OTHER; note = 2'-O-Methyl-guanosine
  modified_base 55: mod_base = OTHER; note = 2'-O-Methyl-cytidine
  modified_base 56: mod_base = OTHER; note = 2'-O-Methyl-uridine
  modified_base 57: mod_base = OTHER; note = 2'-O-Methyl-adenosine
  modified_base 60: mod_base = OTHER; note = 2'-O-Methyl-cytidine
  modified_base 61: mod_base = OTHER; note = 2'-O-Methyl-cytidine
  modified_base 64: mod_base = OTHER; note = uridine phosphorothioate
  modified_base 66: mod_base = OTHER; note = 2'-O-Methyl-uridine
  modified_base 67: mod_base = OTHER; note = 2'-O-Methyl-cytidine
  modified_base 70: mod_base = OTHER; note = 2'-O-Methyl-cytidine
  modified_base 71: mod_base = OTHER; note = 2'-O-Methyl-uridine
  modified_base 72: mod_base = OTHER; note = 2'-O-Methyl-uridine
  modified_base 74: mod_base = OTHER; note = 2'-O-Methyl-adenosine
  modified_base 75: mod_base = OTHER; note = 2'-O-Methyl-adenosine
  modified_base 76: mod_base = OTHER; note = 2'-O-Methyl-adenosine
  modified_base 77: mod_base = OTHER; note = 2'-O-Methyl-adenosine
  modified_base 78: mod_base = OTHER; note = 2'-O-Methyl-adenosine
  modified_base 79: mod_base = OTHER; note = 2'-O-Methyl-guanosine
  modified_base 80: mod_base = OTHER; note = 2'-O-Methyl-uridine
  modified_base 82: mod_base = OTHER; note = 2'-O-Methyl-guanosine
  modified_base 83: mod_base = OTHER; note = 2'-O-Methyl-cytidine
  modified_base 84: mod_base = OTHER; note = 2'-O-Methyl-adenosine
  modified_base 85: mod_base = OTHER; note = 2'-O-Methyl-cytidine
  modified_base 86: mod_base = OTHER; note = 2'-O-Methyl-cytidine
  modified_base 87: mod_base = OTHER; note = 2'-O-Methyl-guanosine
  modified_base 89: mod_base = OTHER; note = 2'-O-Methyl-guanosine
  modified_base 92: mod_base = OTHER; note = 2'-O-Methyl-guanosine
  modified_base 93: mod_base = OTHER; note = 2'-O-Methyl-guanosine
  modified_base 94: mod_base = OTHER; note = 2'-O-Methyl-uridine
  modified_base 95: mod_base = OTHER; note = 2'-O-Methyl-guanosine
  modified_base 96: mod_base = OTHER; note = 2'-O-Methyl-cytidine
  modified_base 97: mod_base = OTHER; note = 2'-O-Methyl-uridine
  modified_base 98: mod_base = OTHER; note = 2'-O-Methyl-uridine phosphorothioate
  modified_base 99: mod_base = OTHER; note = 2'-O-Methyl-uridine phosphorothioate
  modified_base 100: mod_base = OTHER; note = 2'-O-Methyl-uridine

SEQ ID NO: 2674 - RNA, 103 nt, synthetic construct; identical to SEQ ID NO: 1643
  source 1..103: mol_type = other RNA
  modified_base 1: mod_base = OTHER; note = 2'-O-Methyl-cytidine phosphorothioate
  modified_base 2: mod_base = OTHER; note = 2'-O-Methyl-cytidine phosphorothioate
  modified_base 3: mod_base = OTHER; note = 2'-O-Methyl-cytidine
  modified_base 21: mod_base = OTHER; note = 2'-O-Methyl-guanosine
  modified_base 28: mod_base = OTHER; note = 2'-O-Methyl-adenosine
  modified_base 29: mod_base = OTHER; note = 2'-O-Methyl-guanosine
  modified_base 30: mod_base = OTHER; note = 2'-O-Methyl-cytidine
  modified_base 31: mod_base = OTHER; note = 2'-O-Methyl-uridine
  modified_base 32: mod_base = OTHER; note = 2'-O-Methyl-adenosine
  modified_base 33: mod_base = OTHER; note = 2'-O-Methyl-guanosine
  modified_base 34: mod_base = OTHER; note = 2'-O-Methyl-adenosine
  modified_base 35: mod_base = OTHER; note = 2'-O-Methyl-adenosine
  modified_base 36: mod_base = OTHER; note = 2'-O-Methyl-adenosine
  modified_base 37: mod_base = OTHER; note = 2'-O-Methyl-uridine
  modified_base 38: mod_base = OTHER; note = 2'-O-Methyl-adenosine
  modified_base 39: mod_base = OTHER; note = 2'-O-Methyl-guanosine
  modified_base 40: mod_base = OTHER; note = 2'-O-Methyl-cytidine
  modified_base 41: mod_base = OTHER; note = 2'-O-Methyl-adenosine
  modified_base 42: mod_base = OTHER; note = 2'-O-Methyl-adenosine
  modified_base 46: mod_base = OTHER; note = 2'-O-Methyl-adenosine
  modified_base 48: mod_base = OTHER; note = 2'-O-Methyl-adenosine
  modified_base 50: mod_base = OTHER; note = 2'-O-Methyl-uridine
  modified_base 52: mod_base = OTHER; note = 2'-O-Methyl-adenosine
  modified_base 53: mod_base = OTHER; note = 2'-O-Methyl-guanosine
  modified_base 54: mod_base = OTHER; note = 2'-O-Methyl-guanosine
  modified_base 55: mod_base = OTHER; note = 2'-O-Methyl-cytidine
  modified_base 56: mod_base = OTHER; note = 2'-O-Methyl-uridine
  modified_base 57: mod_base = OTHER; note = 2'-O-Methyl-adenosine
  modified_base 60: mod_base = OTHER; note = 2'-O-Methyl-cytidine
  modified_base 61: mod_base = OTHER; note = 2'-O-Methyl-cytidine
  modified_base 66: mod_base = OTHER; note = 2'-O-Methyl-uridine
  modified_base 67: mod_base = OTHER; note = 2'-O-Methyl-cytidine
  modified_base 70: mod_base = OTHER; note = 2'-O-Methyl-cytidine
  modified_base 71: mod_base = OTHER; note = 2'-O-Methyl-uridine
  modified_base 72: mod_base = OTHER; note = 2'-O-Methyl-uridine
  modified_base 73: mod_base = OTHER; note = 2'-O-Methyl-guanosine
  modified_base 74: mod_base = OTHER; note = 2'-O-Methyl-adenosine
  modified_base 75: mod_base = OTHER; note = 2'-O-Methyl-adenosine
  modified_base 76: mod_base = OTHER; note = 2'-O-Methyl-adenosine
  modified_base 77: mod_base = OTHER; note = 2'-O-Methyl-adenosine
  modified_base 78: mod_base = OTHER; note = 2'-O-Methyl-adenosine
  modified_base 79: mod_base = OTHER; note = 2'-O-Methyl-guanosine
  modified_base 80: mod_base = OTHER; note = 2'-O-Methyl-uridine
  modified_base 81: mod_base = OTHER; note = 2'-O-Methyl-guanosine
  modified_base 83: mod_base = OTHER; note = 2'-O-Methyl-cytidine
  modified_base 84: mod_base = OTHER; note = 2'-O-Methyl-adenosine
  modified_base 85: mod_base = OTHER; note = 2'-O-Methyl-cytidine
  modified_base 86: mod_base = OTHER; note = 2'-O-Methyl-cytidine
  modified_base 87: mod_base = OTHER; note = 2'-O-Methyl-guanosine
  modified_base 88: mod_base = OTHER; note = 2'-O-Methyl-adenosine
  modified_base 89: mod_base = OTHER; note = 2'-O-Methyl-guanosine
  modified_base 90: mod_base = OTHER; note = 2'-O-Methyl-uridine
  modified_base 91: mod_base = OTHER; note = 2'-O-Methyl-cytidine
  modified_base 92: mod_base = OTHER; note = 2'-O-Methyl-guanosine
  modified_base 93: mod_base = OTHER; note = 2'-O-Methyl-guanosine
  modified_base 94: mod_base = OTHER; note = 2'-O-Methyl-uridine
  modified_base 95: mod_base = OTHER; note = 2'-O-Methyl-guanosine
  modified_base 96: mod_base = OTHER; note = 2'-O-Methyl-cytidine
  modified_base 97: mod_base = OTHER; note = 2'-O-Methyl-uridine
  modified_base 98: mod_base = OTHER; note = 2'-O-Methyl-uridine phosphorothioate
  modified_base 99: mod_base = OTHER; note = 2'-O-Methyl-uridine phosphorothioate
  modified_base 100: mod_base = OTHER; note = 2'-O-Methyl-uridine

SEQ ID NO: 2675 - RNA, 103 nt, synthetic construct; identical to SEQ ID NO: 1643
  source 1..103: mol_type = other RNA
  modified_base 1: mod_base = OTHER; note = 2'-O-Methyl-cytidine phosphorothioate
  modified_base 2: mod_base = OTHER; note = 2'-O-Methyl-cytidine phosphorothioate
  modified_base 3: mod_base = OTHER; note = 2'-O-Methyl-cytidine
  modified_base 21: mod_base = OTHER; note = 2'-O-Methyl-guanosine
  modified_base 28: mod_base = OTHER; note = 2'-O-Methyl-adenosine
  modified_base 29: mod_base = OTHER; note = 2'-O-Methyl-guanosine
  modified_base 30: mod_base = OTHER; note = 2'-O-Methyl-cytidine
  modified_base 31: mod_base = OTHER; note = 2'-O-Methyl-uridine
  modified_base 32: mod_base = OTHER; note = 2'-O-Methyl-adenosine
  modified_base 34: mod_base = OTHER; note = 2'-O-Methyl-adenosine
  modified_base 35: mod_base = OTHER; note = 2'-O-Methyl-adenosine
  modified_base 36: mod_base = OTHER; note = 2'-O-Methyl-adenosine
  modified_base 37: mod_base = OTHER; note = 2'-O-Methyl-uridine
  modified_base 38: mod_base = OTHER; note = 2'-O-Methyl-adenosine
  modified_base 39: mod_base = OTHER; note = 2'-O-Methyl-guanosine
  modified_base 40: mod_base = OTHER; note = 2'-O-Methyl-cytidine
  modified_base 41: mod_base = OTHER; note = 2'-O-Methyl-adenosine
  modified_base 42: mod_base = OTHER; note = 2'-O-Methyl-adenosine
  modified_base 46: mod_base = OTHER; note = 2'-O-Methyl-adenosine
  modified_base 48: mod_base = OTHER; note = 2'-O-Methyl-adenosine
  modified_base 50: mod_base = OTHER; note = 2'-O-Methyl-uridine
  modified_base 52: mod_base = OTHER; note = 2'-O-Methyl-adenosine
  modified_base 53: mod_base = OTHER; note = 2'-O-Methyl-guanosine
  modified_base 54: mod_base = OTHER; note = 2'-O-Methyl-guanosine
  modified_base 55: mod_base = OTHER; note = 2'-O-Methyl-cytidine
  modified_base 56: mod_base = OTHER; note = 2'-O-Methyl-uridine
  modified_base 57: mod_base = OTHER; note = 2'-O-Methyl-adenosine
  modified_base 60: mod_base = OTHER; note = 2'-O-Methyl-cytidine
  modified_base 61: mod_base = OTHER; note = 2'-O-Methyl-cytidine
  modified_base 66: mod_base = OTHER; note = 2'-O-Methyl-uridine
  modified_base 67: mod_base = OTHER; note = 2'-O-Methyl-cytidine
  modified_base 70: mod_base = OTHER; note = 2'-O-Methyl-cytidine
  modified_base 71: mod_base = OTHER; note = 2'-O-Methyl-uridine
  modified_base 72: mod_base = OTHER; note = 2'-O-Methyl-uridine
  modified_base 74: mod_base = OTHER; note = 2'-O-Methyl-adenosine
  modified_base 75: mod_base = OTHER; note = 2'-O-Methyl-adenosine
  modified_base 76: mod_base = OTHER; note = 2'-O-Methyl-adenosine
  modified_base 77: mod_base = OTHER; note = 2'-O-Methyl-adenosine
  modified_base 78: mod_base = OTHER; note = 2'-O-Methyl-adenosine
  modified_base 79: mod_base = OTHER; note = 2'-O-Methyl-guanosine
  modified_base 80: mod_base = OTHER; note = 2'-O-Methyl-uridine
  modified_base 81: mod_base = OTHER; note = 2'-O-Methyl-guanosine
  modified_base 83: mod_base = OTHER; note = 2'-O-Methyl-cytidine
  modified_base 84: mod_base = OTHER; note = 2'-O-Methyl-adenosine
  modified_base 85: mod_base = OTHER; note = 2'-O-Methyl-cytidine
  modified_base 86: mod_base = OTHER; note = 2'-O-Methyl-cytidine
  modified_base 87: mod_base = OTHER; note = 2'-O-Methyl-guanosine
  modified_base 88: mod_base = OTHER; note = 2'-O-Methyl-adenosine
  modified_base 89: mod_base = OTHER; note = 2'-O-Methyl-guanosine
  modified_base 90: mod_base = OTHER; note = 2'-O-Methyl-uridine
  modified_base 91: mod_base = OTHER; note = 2'-O-Methyl-cytidine
  modified_base 92: mod_base = OTHER; note = 2'-O-Methyl-guanosine
  modified_base 93: mod_base = OTHER; note = 2'-O-Methyl-guanosine
  modified_base 94: mod_base = OTHER; note = 2'-O-Methyl-uridine
  modified_base 95: mod_base = OTHER; note = 2'-O-Methyl-guanosine
  modified_base 96: mod_base = OTHER; note = 2'-O-Methyl-cytidine
  modified_base 97: mod_base = OTHER; note = 2'-O-Methyl-uridine
  modified_base 98: mod_base = OTHER; note = 2'-O-Methyl-uridine phosphorothioate
  modified_base 99: mod_base = OTHER; note = 2'-O-Methyl-uridine phosphorothioate
  modified_base 100: mod_base = OTHER; note = 2'-O-Methyl-uridine

SEQ ID NO: 2676 - RNA, 103 nt, synthetic construct; identical to SEQ ID NO: 1699
  source 1..103: mol_type = other RNA
  modified_base 1: mod_base = OTHER; note = 2'-O-Methyl-guanosine phosphorothioate
  modified_base 2: mod_base = OTHER; note = 2'-O-Methyl-adenosine phosphorothioate
  modified_base 3: mod_base = OTHER; note = 2'-O-Methyl-guanosine
  modified_base 21: mod_base = OTHER; note = 2'-O-Methyl-guanosine
  modified_base 28: mod_base = OTHER; note = 2'-O-Methyl-adenosine
  modified_base 29: mod_base = OTHER; note = 2'-O-Methyl-guanosine
  modified_base 30: mod_base = OTHER; note = 2'-O-Methyl-cytidine
  modified_base 31: mod_base = OTHER; note = 2'-O-Methyl-uridine
  modified_base 32: mod_base = OTHER; note = 2'-O-Methyl-adenosine
  modified_base 33: mod_base = OTHER; note = 2'-O-Methyl-guanosine
  modified_base 34: mod_base = OTHER; note = 2'-O-Methyl-adenosine
  modified_base 35: mod_base = OTHER; note = 2'-O-Methyl-adenosine
  modified_base 36: mod_base = OTHER; note = 2'-O-Methyl-adenosine
  modified_base 37: mod_base = OTHER; note = 2'-O-Methyl-uridine
  modified_base 38: mod_base = OTHER; note = 2'-O-Methyl-adenosine
  modified_base 39: mod_base = OTHER; note = 2'-O-Methyl-guanosine
  modified_base 40: mod_base = OTHER; note = 2'-O-Methyl-cytidine
  modified_base 41: mod_base = OTHER; note = 2'-O-Methyl-adenosine
  modified_base 42: mod_base = OTHER; note = 2'-O-Methyl-adenosine
  modified_base 46: mod_base = OTHER; note = 2'-O-Methyl-adenosine
  modified_base 48: mod_base = OTHER; note = 2'-O-Methyl-adenosine
  modified_base 50: mod_base = OTHER; note = 2'-O-Methyl-uridine
  modified_base 52: mod_base = OTHER; note = 2'-O-Methyl-adenosine
  modified_base 53: mod_base = OTHER; note = 2'-O-Methyl-guanosine
  modified_base 54: mod_base = OTHER; note = 2'-O-Methyl-guanosine
  modified_base 55: mod_base = OTHER; note = 2'-O-Methyl-cytidine
  modified_base 56: mod_base = OTHER; note = 2'-O-Methyl-uridine
  modified_base 57: mod_base = OTHER; note = 2'-O-Methyl-adenosine
  modified_base 60: mod_base = OTHER; note = 2'-O-Methyl-cytidine
  modified_base 61: mod_base = OTHER; note = 2'-O-Methyl-cytidine
  modified_base 66: mod_base = OTHER; note = 2'-O-Methyl-uridine
  modified_base 67: mod_base = OTHER; note = 2'-O-Methyl-cytidine
  modified_base 70: mod_base = OTHER; note = 2'-O-Methyl-cytidine
  modified_base 71: mod_base = OTHER; note = 2'-O-Methyl-uridine
  modified_base 72: mod_base = OTHER; note = 2'-O-Methyl-uridine
  modified_base 73: mod_base = OTHER; note = 2'-O-Methyl-guanosine
  modified_base 74: mod_base = OTHER; note = 2'-O-Methyl-adenosine
  modified_base 75: mod_base = OTHER; note = 2'-O-Methyl-adenosine
  modified_base 76: mod_base = OTHER; note = 2'-O-Methyl-adenosine
  modified_base 77: mod_base = OTHER; note = 2'-O-Methyl-adenosine
  modified_base 78: mod_base = OTHER; note = 2'-O-Methyl-adenosine
  modified_base 79: mod_base = OTHER; note = 2'-O-Methyl-guanosine
  modified_base 80: mod_base = OTHER; note = 2'-O-Methyl-uridine
  modified_base 81: mod_base = OTHER; note = 2'-O-Methyl-guanosine
  modified_base 83: mod_base = OTHER; note = 2'-O-Methyl-cytidine
  modified_base 84: mod_base = OTHER; note = 2'-O-Methyl-adenosine
  modified_base 85: mod_base = OTHER; note = 2'-O-Methyl-cytidine
  modified_base 86: mod_base = OTHER; note = 2'-O-Methyl-cytidine
  modified_base 87: mod_base = OTHER; note = 2'-O-Methyl-guanosine
  modified_base 88: mod_base = OTHER; note = 2'-O-Methyl-adenosine
  modified_base 89: mod_base = OTHER; note = 2'-O-Methyl-guanosine
  modified_base 90: mod_base = OTHER; note = 2'-O-Methyl-uridine
  modified_base 91: mod_base = OTHER; note = 2'-O-Methyl-cytidine
  modified_base 92: mod_base = OTHER; note = 2'-O-Methyl-guanosine
  modified_base 93: mod_base = OTHER; note = 2'-O-Methyl-guanosine
  modified_base 94: mod_base = OTHER; note = 2'-O-Methyl-uridine
  modified_base 95: mod_base = OTHER; note = 2'-O-Methyl-guanosine
  modified_base 96: mod_base = OTHER; note = 2'-O-Methyl-cytidine
  modified_base 97: mod_base = OTHER; note = 2'-O-Methyl-uridine
  modified_base 98: mod_base = OTHER; note = 2'-O-Methyl-uridine phosphorothioate
  modified_base 99: mod_base = OTHER; note = 2'-O-Methyl-uridine phosphorothioate
  modified_base 100: mod_base = OTHER; note = 2'-O-Methyl-uridine

SEQ ID NO: 2677 - RNA, 103 nt, synthetic construct; identical to SEQ ID NO: 1699
  source 1..103: mol_type = other RNA
  modified_base 1: mod_base = OTHER; note = 2'-O-Methyl-guanosine phosphorothioate
  modified_base 2: mod_base = OTHER; note = 2'-O-Methyl-adenosine phosphorothioate
  modified_base 3: mod_base = OTHER; note = 2'-O-Methyl-guanosine
  modified_base 21: mod_base = OTHER; note = 2'-O-Methyl-guanosine
  modified_base 28: mod_base = OTHER; note = 2'-O-Methyl-adenosine
  modified_base 29: mod_base = OTHER; note = 2'-O-Methyl-guanosine
  modified_base 30: mod_base = OTHER; note = 2'-O-Methyl-cytidine
  modified_base 31: mod_base = OTHER; note = 2'-O-Methyl-uridine
  modified_base 32: mod_base = OTHER; note = 2'-O-Methyl-adenosine
  modified_base 34: mod_base = OTHER; note = 2'-O-Methyl-adenosine
  modified_base 35: mod_base = OTHER; note = 2'-O-Methyl-adenosine
  modified_base 36: mod_base = OTHER; note = 2'-O-Methyl-adenosine
  modified_base 37: mod_base = OTHER; note = 2'-O-Methyl-uridine
  modified_base 38: mod_base = OTHER; note = 2'-O-Methyl-adenosine
  modified_base 39: mod_base = OTHER; note = 2'-O-Methyl-guanosine
  modified_base 40: mod_base = OTHER; note = 2'-O-Methyl-cytidine
  modified_base 41: mod_base = OTHER; note = 2'-O-Methyl-adenosine
  modified_base 42: mod_base = OTHER; note = 2'-O-Methyl-adenosine
  modified_base 46: mod_base = OTHER; note = 2'-O-Methyl-adenosine
  modified_base 48: mod_base = OTHER; note = 2'-O-Methyl-adenosine
  modified_base 50: mod_base = OTHER; note = 2'-O-Methyl-uridine
  modified_base 52: mod_base = OTHER; note = 2'-O-Methyl-adenosine
  modified_base 53: mod_base = OTHER; note = 2'-O-Methyl-guanosine
  modified_base 54: mod_base = OTHER; note = 2'-O-Methyl-guanosine
  modified_base 55: mod_base = OTHER; note = 2'-O-Methyl-cytidine
  modified_base 56: mod_base = OTHER; note = 2'-O-Methyl-uridine
  modified_base 57: mod_base = OTHER; note = 2'-O-Methyl-adenosine
  modified_base 60: mod_base = OTHER; note = 2'-O-Methyl-cytidine
  modified_base 61: mod_base = OTHER; note = 2'-O-Methyl-cytidine
  modified_base 66: mod_base = OTHER; note = 2'-O-Methyl-uridine
  modified_base 67: mod_base = OTHER; note = 2'-O-Methyl-cytidine
  modified_base 70: mod_base = OTHER; note = 2'-O-Methyl-cytidine
  modified_base 71: mod_base = OTHER; note = 2'-O-Methyl-uridine
  modified_base 72: mod_base = OTHER; note = 2'-O-Methyl-uridine
  modified_base 74: mod_base = OTHER; note = 2'-O-Methyl-adenosine
  modified_base 75: mod_base = OTHER; note = 2'-O-Methyl-adenosine
  modified_base 76: mod_base = OTHER; note = 2'-O-Methyl-adenosine
  modified_base 77: mod_base = OTHER; note = 2'-O-Methyl-adenosine
  modified_base 78: mod_base = OTHER; note = 2'-O-Methyl-adenosine
  modified_base 79: mod_base = OTHER; note = 2'-O-Methyl-guanosine
  modified_base 80: mod_base = OTHER; note = 2'-O-Methyl-uridine
  modified_base 81: mod_base = OTHER; note = 2'-O-Methyl-guanosine
  modified_base 83: mod_base = OTHER; note = 2'-O-Methyl-cytidine
  modified_base 84: mod_base = OTHER; note = 2'-O-Methyl-adenosine
  modified_base 85: mod_base = OTHER; note = 2'-O-Methyl-cytidine
  modified_base 86: mod_base = OTHER; note = 2'-O-Methyl-cytidine
  modified_base 87: mod_base = OTHER; note = 2'-O-Methyl-guanosine
  modified_base 88: mod_base = OTHER; note = 2'-O-Methyl-adenosine
  modified_base 89: mod_base = OTHER; note = 2'-O-Methyl-guanosine
  modified_base 90: mod_base = OTHER; note = 2'-O-Methyl-uridine
  modified_base 91: mod_base = OTHER; note = 2'-O-Methyl-cytidine
  modified_base 92: mod_base = OTHER; note = 2'-O-Methyl-guanosine
  modified_base 93: mod_base = OTHER; note = 2'-O-Methyl-guanosine
  modified_base 94: mod_base = OTHER; note = 2'-O-Methyl-uridine
  modified_base 95: mod_base = OTHER; note = 2'-O-Methyl-guanosine
  modified_base 96: mod_base = OTHER; note = 2'-O-Methyl-cytidine
  modified_base 97: mod_base = OTHER; note = 2'-O-Methyl-uridine
  modified_base 98: mod_base = OTHER; note = 2'-O-Methyl-uridine phosphorothioate
  modified_base 99: mod_base = OTHER; note = 2'-O-Methyl-uridine phosphorothioate
  modified_base 100: mod_base = OTHER; note = 2'-O-Methyl-uridine

SEQ ID NO: 2678 - RNA, 103 nt, synthetic construct; identical to SEQ ID NO: 1700
  source 1..103: mol_type = other RNA
  modified_base 1: mod_base = OTHER; note = 2'-O-Methyl-cytidine phosphorothioate
  modified_base 2: mod_base = OTHER; note = 2'-O-Methyl-adenosine phosphorothioate
  modified_base 3: mod_base = OTHER; note = 2'-O-Methyl-guanosine
  modified_base 21: mod_base = OTHER; note = 2'-O-Methyl-guanosine
  modified_base 28: mod_base = OTHER; note = 2'-O-Methyl-adenosine
  modified_base 29: mod_base = OTHER; note = 2'-O-Methyl-guanosine
  modified_base 30: mod_base = OTHER; note = 2'-O-Methyl-cytidine
  modified_base 31: mod_base = OTHER; note = 2'-O-Methyl-uridine
  modified_base 32: mod_base = OTHER; note = 2'-O-Methyl-adenosine
  modified_base 34: mod_base = OTHER; note = 2'-O-Methyl-adenosine
  modified_base 35: mod_base = OTHER; note = 2'-O-Methyl-adenosine
  modified_base 36: mod_base = OTHER; note = 2'-O-Methyl-adenosine
  modified_base 37: mod_base = OTHER; note = 2'-O-Methyl-uridine
  modified_base 38: mod_base = OTHER; note = 2'-O-Methyl-adenosine
  modified_base 39: mod_base = OTHER; note = 2'-O-Methyl-guanosine
  modified_base 40: mod_base = OTHER; note = 2'-O-Methyl-cytidine
  modified_base 41: mod_base = OTHER; note = 2'-O-Methyl-adenosine
  modified_base 42: mod_base = OTHER; note = 2'-O-Methyl-adenosine
  modified_base 46: mod_base = OTHER; note = 2'-O-Methyl-adenosine
  modified_base 48: mod_base = OTHER; note = 2'-O-Methyl-adenosine
  modified_base 50: mod_base = OTHER; note = 2'-O-Methyl-uridine
  modified_base 52: mod_base = OTHER; note = 2'-O-Methyl-adenosine
  modified_base 53: mod_base = OTHER; note = 2'-O-Methyl-guanosine
  modified_base 54: mod_base = OTHER; note = 2'-O-Methyl-guanosine
  modified_base 55: mod_base = OTHER; note = 2'-O-Methyl-cytidine
  modified_base 56: mod_base = OTHER; note = 2'-O-Methyl-uridine
  modified_base 57: mod_base = OTHER; note = 2'-O-Methyl-adenosine
  modified_base 60: mod_base = OTHER; note = 2'-O-Methyl-cytidine
  modified_base 61: mod_base = OTHER; note = 2'-O-Methyl-cytidine
  modified_base 66: mod_base = OTHER; note = 2'-O-Methyl-uridine
  modified_base 67: mod_base = OTHER; note = 2'-O-Methyl-cytidine
  modified_base 70: mod_base = OTHER; note = 2'-O-Methyl-cytidine
  modified_base 71: mod_base = OTHER; note = 2'-O-Methyl-uridine
  modified_base 72: mod_base = OTHER; note = 2'-O-Methyl-uridine
  modified_base 74: mod_base = OTHER; note = 2'-O-Methyl-adenosine
  modified_base 75: mod_base = OTHER; note = 2'-O-Methyl-adenosine
  modified_base 76: mod_base = OTHER; note = 2'-O-Methyl-adenosine
  modified_base 77: mod_base = OTHER; note = 2'-O-Methyl-adenosine
  modified_base 78: mod_base = OTHER; note = 2'-O-Methyl-adenosine
  modified_base 79: mod_base = OTHER; note = 2'-O-Methyl-guanosine
  modified_base 80: mod_base = OTHER; note = 2'-O-Methyl-uridine
  modified_base 81: mod_base = OTHER; note = 2'-O-Methyl-guanosine
  modified_base 83: mod_base = OTHER; note = 2'-O-Methyl-cytidine
  modified_base 84: mod_base = OTHER; note = 2'-O-Methyl-adenosine
  modified_base 85: mod_base = OTHER; note = 2'-O-Methyl-cytidine
  modified_base 86: mod_base = OTHER; note = 2'-O-Methyl-cytidine
  modified_base 87: mod_base = OTHER; note = 2'-O-Methyl-guanosine
  modified_base 88: mod_base = OTHER; note = 2'-O-Methyl-adenosine
  modified_base 89: mod_base = OTHER; note = 2'-O-Methyl-guanosine
  modified_base 90: mod_base = OTHER; note = 2'-O-Methyl-uridine
  modified_base 91: mod_base = OTHER; note = 2'-O-Methyl-cytidine
  modified_base 92: mod_base = OTHER; note = 2'-O-Methyl-guanosine
  modified_base 93: mod_base = OTHER; note = 2'-O-Methyl-guanosine
  modified_base 94: mod_base = OTHER; note = 2'-O-Methyl-uridine
  modified_base 95: mod_base = OTHER; note = 2'-O-Methyl-guanosine
  modified_base 96: mod_base = OTHER; note = 2'-O-Methyl-cytidine
  modified_base 97: mod_base = OTHER; note = 2'-O-Methyl-uridine
  modified_base 98: mod_base = OTHER; note = 2'-O-Methyl-uridine phosphorothioate
  modified_base 99: mod_base = OTHER; note = 2'-O-Methyl-uridine phosphorothioate
  modified_base 100: mod_base = OTHER; note = 2'-O-Methyl-uridine

SEQ ID NO: 2679 - RNA, 103 nt, synthetic construct; identical to SEQ ID NO: 1700
  source 1..103: mol_type = other RNA
  modified_base 1: mod_base = OTHER; note = 2'-O-Methyl-cytidine phosphorothioate
  modified_base 2: mod_base = OTHER; note = 2'-O-Methyl-adenosine phosphorothioate
  modified_base 3: mod_base = OTHER; note = 2'-O-Methyl-guanosine
  modified_base 21: mod_base = OTHER; note = 2'-O-Methyl-guanosine
  modified_base 28: mod_base = OTHER; note = 2'-O-Methyl-adenosine
  modified_base 29: mod_base = OTHER; note = 2'-O-Methyl-guanosine
  modified_base 30: mod_base = OTHER; note = 2'-O-Methyl-cytidine
  modified_base 31: mod_base = OTHER; note = 2'-O-Methyl-uridine
  modified_base 32: mod_base = OTHER; note = 2'-O-Methyl-adenosine
  modified_base 33: mod_base = OTHER; note = 2'-O-Methyl-guanosine
  modified_base 34: mod_base = OTHER; note = 2'-O-Methyl-adenosine
  modified_base 35: mod_base = OTHER; note = 2'-O-Methyl-adenosine
  modified_base 36: mod_base = OTHER; note = 2'-O-Methyl-adenosine
  modified_base 37: mod_base = OTHER; note = 2'-O-Methyl-uridine
  modified_base 38: mod_base = OTHER; note = 2'-O-Methyl-adenosine
  modified_base 39: mod_base = OTHER; note = 2'-O-Methyl-guanosine
  modified_base 40: mod_base = OTHER; note = 2'-O-Methyl-cytidine
  modified_base 41: mod_base = OTHER; note = 2'-O-Methyl-adenosine
  modified_base 42: mod_base = OTHER; note = 2'-O-Methyl-adenosine
  modified_base 46: mod_base = OTHER; note = 2'-O-Methyl-adenosine
  modified_base 48: mod_base = OTHER; note = 2'-O-Methyl-adenosine
  modified_base 50: mod_base = OTHER; note = 2'-O-Methyl-uridine
  modified_base 52: mod_base = OTHER; note = 2'-O-Methyl-adenosine
  modified_base 53: mod_base = OTHER; note = 2'-O-Methyl-guanosine
  modified_base 54: mod_base = OTHER; note = 2'-O-Methyl-guanosine
  modified_base 57: mod_base = OTHER; note = 2'-O-Methyl-adenosine
  modified_base 61: mod_base = OTHER; note = 2'-O-Methyl-cytidine
  modified_base 66: mod_base = OTHER; note = 2'-O-Methyl-uridine
  modified_base 67: mod_base = OTHER; note = 2'-O-Methyl-cytidine
  modified_base 70: mod_base = OTHER; note = 2'-O-Methyl-cytidine
  modified_base 71: mod_base = OTHER; note = 2'-O-Methyl-uridine
  modified_base 72: mod_base = OTHER; note = 2'-O-Methyl-uridine
  modified_base 74: mod_base = OTHER; note = 2'-O-Methyl-adenosine
  modified_base 75: mod_base = OTHER; note = 2'-O-Methyl-adenosine
  modified_base 76: mod_base = OTHER; note = 2'-O-Methyl-adenosine
  modified_base 77: mod_base = OTHER; note = 2'-O-Methyl-adenosine
  modified_base 78: mod_base = OTHER; note = 2'-O-Methyl-adenosine
  modified_base 79: mod_base = OTHER; note = 2'-O-Methyl-guanosine
  modified_base 80: mod_base = OTHER; note = 2'-O-Methyl-uridine
  modified_base 82: mod_base = OTHER; note = 2'-O-Methyl-guanosine
  modified_base 83: mod_base = OTHER; note = 2'-O-Methyl-cytidine
  modified_base 84: mod_base = OTHER; note = 2'-O-Methyl-adenosine
  modified_base 85: mod_base = OTHER; note = 2'-O-Methyl-cytidine
  modified_base 86: mod_base = OTHER; note = 2'-O-Methyl-cytidine
  modified_base 87: mod_base = OTHER; note = 2'-O-Methyl-guanosine
  modified_base 89: mod_base = OTHER; note = 2'-O-Methyl-guanosine
  modified_base 92: mod_base = OTHER; note = 2'-O-Methyl-guanosine
  modified_base 93: mod_base = OTHER; note = 2'-O-Methyl-guanosine
  modified_base 94: mod_base = OTHER; note = 2'-O-Methyl-uridine
  modified_base 95: mod_base = OTHER; note = 2'-O-Methyl-guanosine
  modified_base 96: mod_base = OTHER; note = 2'-O-Methyl-cytidine
  modified_base 97: mod_base = OTHER; note = 2'-O-Methyl-uridine
  modified_base 98: mod_base = OTHER; note = 2'-O-Methyl-uridine phosphorothioate
  modified_base 99: mod_base = OTHER; note = 2'-O-Methyl-uridine phosphorothioate
  modified_base 100: mod_base = OTHER; note = 2'-O-Methyl-uridine

SEQ ID NO: 2680 - RNA, 103 nt, synthetic construct; identical to SEQ ID NO: 1700
  source 1..103: mol_type = other RNA
  modified_base 1: mod_base = OTHER; note = 2'-O-Methyl-cytidine phosphorothioate
  modified_base 2: mod_base = OTHER; note = 2'-O-Methyl-adenosine phosphorothioate
  modified_base 3: mod_base = OTHER; note = 2'-O-Methyl-guanosine
  modified_base 21: mod_base = OTHER; note = 2'-O-Methyl-guanosine
  modified_base 28: mod_base = OTHER; note = 2'-O-Methyl-adenosine
  modified_base 29: mod_base = OTHER; note = 2'-O-Methyl-guanosine
  modified_base 30: mod_base = OTHER; note = 2'-O-Methyl-cytidine
  modified_base 31: mod_base = OTHER; note = 2'-O-Methyl-uridine
  modified_base 32: mod_base = OTHER; note = 2'-O-Methyl-adenosine
  modified_base 33: mod_base = OTHER; note = 2'-O-Methyl-guanosine
  modified_base 34: mod_base = OTHER; note = 2'-O-Methyl-adenosine
  modified_base 35: mod_base = OTHER; note = 2'-O-Methyl-adenosine
  modified_base 36: mod_base = OTHER; note = 2'-O-Methyl-adenosine
  modified_base 37: mod_base = OTHER; note = 2'-O-Methyl-uridine
  modified_base 38: mod_base = OTHER; note = 2'-O-Methyl-adenosine
  modified_base 39: mod_base = OTHER; note = 2'-O-Methyl-guanosine
  modified_base 40: mod_base = OTHER; note = 2'-O-Methyl-cytidine
  modified_base 41: mod_base = OTHER; note = 2'-O-Methyl-adenosine
  modified_base 42: mod_base = OTHER; note = 2'-O-Methyl-adenosine
  modified_base 46: mod_base = OTHER; note = 2'-O-Methyl-adenosine
  modified_base 48: mod_base = OTHER; note = 2'-O-Methyl-adenosine
  modified_base 50: mod_base = OTHER; note = 2'-O-Methyl-uridine
  modified_base 52: mod_base = OTHER; note = 2'-O-Methyl-adenosine
  modified_base 53: mod_base = OTHER; note = 2'-O-Methyl-guanosine
  modified_base 54: mod_base = OTHER; note = 2'-O-Methyl-guanosine
  modified_base 55: mod_base = OTHER; note = 2'-O-Methyl-cytidine
  modified_base 56: mod_base = OTHER; note = 2'-O-Methyl-uridine
  modified_base 57: mod_base = OTHER; note = 2'-O-Methyl-adenosine
  modified_base 60: mod_base = OTHER; note = 2'-O-Methyl-cytidine
  modified_base 61: mod_base = OTHER; note = 2'-O-Methyl-cytidine
  modified_base 66: mod_base = OTHER; note = 2'-O-Methyl-uridine
  modified_base 67: mod_base = OTHER; note = 2'-O-Methyl-cytidine
  modified_base 70: mod_base = OTHER; note = 2'-O-Methyl-cytidine
  modified_base 71: mod_base = OTHER; note = 2'-O-Methyl-uridine
  modified_base 72: mod_base = OTHER; note = 2'-O-Methyl-uridine
  modified_base 74: mod_base = OTHER; note = 2'-O-Methyl-adenosine
  modified_base 75: mod_base = OTHER; note = 2'-O-Methyl-adenosine
  modified_base 76: mod_base = OTHER; note = 2'-O-Methyl-adenosine
  modified_base 77: mod_base = OTHER; note = 2'-O-Methyl-adenosine
  modified_base 78: mod_base = OTHER; note = 2'-O-Methyl-adenosine
  modified_base 79: mod_base = OTHER; note = 2'-O-Methyl-guanosine
  modified_base 80: mod_base = OTHER; note = 2'-O-Methyl-uridine
  modified_base 82: mod_base = OTHER; note = 2'-O-Methyl-guanosine
  modified_base 83: mod_base = OTHER; note = 2'-O-Methyl-cytidine
  modified_base 84: mod_base = OTHER; note = 2'-O-Methyl-adenosine
  modified_base 85: mod_base = OTHER; note = 2'-O-Methyl-cytidine
  modified_base 86: mod_base = OTHER; note = 2'-O-Methyl-cytidine
  modified_base 87: mod_base = OTHER; note = 2'-O-Methyl-guanosine
  modified_base 89: mod_base = OTHER; note = 2'-O-Methyl-guanosine
  modified_base 92: mod_base = OTHER; note = 2'-O-Methyl-guanosine
  modified_base 93: mod_base = OTHER; note = 2'-O-Methyl-guanosine
  modified_base 94: mod_base = OTHER; note = 2'-O-Methyl-uridine
  modified_base 95: mod_base = OTHER; note = 2'-O-Methyl-guanosine
  modified_base 96: mod_base = OTHER; note = 2'-O-Methyl-cytidine
  modified_base 97: mod_base = OTHER; note = 2'-O-Methyl-uridine
  modified_base 98: mod_base = OTHER; note = 2'-O-Methyl-uridine phosphorothioate
  modified_base 99: mod_base = OTHER; note = 2'-O-Methyl-uridine phosphorothioate
  modified_base 100: mod_base = OTHER; note = 2'-O-Methyl-uridine

SEQ ID NO: 2681 - RNA, 103 nt, synthetic construct; identical to SEQ ID NO: 1700
  source 1..103: mol_type = other RNA
  modified_base 1: mod_base = OTHER; note = 2'-O-Methyl-cytidine phosphorothioate
  modified_base 2: mod_base = OTHER; note = 2'-O-Methyl-adenosine phosphorothioate
  modified_base 3: mod_base = OTHER; note = 2'-O-Methyl-guanosine
  modified_base 21: mod_base = OTHER; note = 2'-O-Methyl-guanosine
  modified_base 28: mod_base = OTHER; note = 2'-O-Methyl-adenosine
  modified_base 29: mod_base = OTHER; note = 2'-O-Methyl-guanosine
  modified_base 30: mod_base = OTHER; note = 2'-O-Methyl-cytidine
  modified_base 31: mod_base = OTHER; note = 2'-O-Methyl-uridine
  modified_base 32: mod_base = OTHER; note = 2'-O-Methyl-adenosine
  modified_base 33: mod_base = OTHER; note = 2'-O-Methyl-guanosine
  modified_base 34: mod_base = OTHER; note = 2'-O-Methyl-adenosine
  modified_base 35: mod_base = OTHER; note = 2'-O-Methyl-adenosine
  modified_base 36: mod_base = OTHER; note = 2'-O-Methyl-adenosine
  modified_base 37: mod_base = OTHER; note = 2'-O-Methyl-uridine
  modified_base 38: mod_base = OTHER; note = 2'-O-Methyl-adenosine
  modified_base 39: mod_base = OTHER; note = 2'-O-Methyl-guanosine
  modified_base 40: mod_base = OTHER; note = 2'-O-Methyl-cytidine
  modified_base 41: mod_base = OTHER; note = 2'-O-Methyl-adenosine
  modified_base 42: mod_base = OTHER; note = 2'-O-Methyl-adenosine
  modified_base 46: mod_base = OTHER; note = 2'-O-Methyl-adenosine
  modified_base 48: mod_base = OTHER; note = 2'-O-Methyl-adenosine
  modified_base 50: mod_base = OTHER; note = 2'-O-Methyl-uridine
  modified_base 52: mod_base = OTHER; note = 2'-O-Methyl-adenosine
  modified_base 53: mod_base = OTHER; note = 2'-O-Methyl-guanosine
  modified_base 54: mod_base = OTHER; note = 2'-O-Methyl-guanosine
  modified_base 57: mod_base = OTHER; note = 2'-O-Methyl-adenosine
  modified_base 61: mod_base = OTHER; note = 2'-O-Methyl-cytidine
  modified_base 66: mod_base = OTHER; note = 2'-O-Methyl-uridine
  modified_base 67: mod_base = OTHER; note = 2'-O-Methyl-cytidine
  modified_base 70: mod_base = OTHER; note = 2'-O-Methyl-cytidine
  modified_base 71: mod_base = OTHER; note = 2'-O-Methyl-uridine
  modified_base 72: mod_base = OTHER; note = 2'-O-Methyl-uridine
  modified_base 73: mod_base = OTHER; note = 2'-O-Methyl-guanosine
  modified_base 74: mod_base = OTHER; note = 2'-O-Methyl-adenosine
  modified_base 75: mod_base = OTHER; note = 2'-O-Methyl-adenosine
  modified_base 76: mod_base = OTHER; note = 2'-O-Methyl-adenosine
  modified_base 77: mod_base = OTHER; note = 2'-O-Methyl-adenosine
  modified_base 78: mod_base = OTHER; note = 2'-O-Methyl-adenosine
  modified_base 79: mod_base = OTHER; note = 2'-O-Methyl-guanosine
  modified_base 80: mod_base = OTHER; note = 2'-O-Methyl-uridine
  modified_base 82: mod_base = OTHER; note = 2'-O-Methyl-guanosine
  modified_base 83: mod_base = OTHER; note = 2'-O-Methyl-cytidine
  modified_base 84: mod_base = OTHER; note = 2'-O-Methyl-adenosine
  modified_base 85: mod_base = OTHER; note = 2'-O-Methyl-cytidine
  modified_base 86: mod_base = OTHER; note = 2'-O-Methyl-cytidine
  modified_base 87: mod_base = OTHER; note = 2'-O-Methyl-guanosine
  modified_base 89: mod_base = OTHER; note = 2'-O-Methyl-guanosine
  modified_base 92: mod_base = OTHER; note = 2'-O-Methyl-guanosine
  modified_base 93: mod_base = OTHER; note = 2'-O-Methyl-guanosine
  modified_base 94: mod_base = OTHER; note = 2'-O-Methyl-uridine
  modified_base 95: mod_base = OTHER; note = 2'-O-Methyl-guanosine
  modified_base 96: mod_base = OTHER; note = 2'-O-Methyl-cytidine
  modified_base 97: mod_base = OTHER; note = 2'-O-Methyl-uridine
  modified_base 98: mod_base = OTHER; note = 2'-O-Methyl-uridine phosphorothioate
  modified_base 99: mod_base = OTHER; note = 2'-O-Methyl-uridine phosphorothioate
  modified_base 100: mod_base = OTHER; note = 2'-O-Methyl-uridine

SEQ ID NO: 2682 - RNA, 103 nt, synthetic construct; identical to SEQ ID NO: 1700
  source 1..103: mol_type = other RNA
  modified_base 1: mod_base = OTHER; note = 2'-O-Methyl-cytidine phosphorothioate
  modified_base 2: mod_base = OTHER; note = 2'-O-Methyl-adenosine phosphorothioate
  modified_base 3: mod_base = OTHER; note = 2'-O-Methyl-guanosine
  modified_base 21: mod_base = OTHER; note = 2'-O-Methyl-guanosine
  modified_base 28: mod_base = OTHER; note = 2'-O-Methyl-adenosine
  modified_base 29: mod_base = OTHER; note = 2'-O-Methyl-guanosine
  modified_base 30: mod_base = OTHER; note = 2'-O-Methyl-cytidine
  modified_base 31: mod_base = OTHER; note = 2'-O-Methyl-uridine
  modified_base 32: mod_base = OTHER; note = 2'-O-Methyl-adenosine
  modified_base 33: mod_base = OTHER; note = 2'-O-Methyl-guanosine
  modified_base 34: mod_base = OTHER; note = 2'-O-Methyl-adenosine
  modified_base 35: mod_base = OTHER; note = 2'-O-Methyl-adenosine
  modified_base 36: mod_base = OTHER; note = 2'-O-Methyl-adenosine
  modified_base 37: mod_base = OTHER; note = 2'-O-Methyl-uridine
  modified_base 38: mod_base = OTHER; note = 2'-O-Methyl-adenosine
  modified_base 39: mod_base = OTHER; note = 2'-O-Methyl-guanosine
  modified_base 40: mod_base = OTHER; note = 2'-O-Methyl-cytidine
  modified_base 41: mod_base = OTHER; note = 2'-O-Methyl-adenosine
  modified_base 42: mod_base = OTHER; note = 2'-O-Methyl-adenosine
  modified_base 46: mod_base = OTHER; note = 2'-O-Methyl-adenosine
  modified_base 48: mod_base = OTHER; note = 2'-O-Methyl-adenosine
  modified_base 50: mod_base = OTHER; note = 2'-O-Methyl-uridine
  modified_base 52: mod_base = OTHER; note = 2'-O-Methyl-adenosine
  modified_base 53: mod_base = OTHER; note = 2'-O-Methyl-guanosine
  modified_base 54: mod_base = OTHER; note = 2'-O-Methyl-guanosine
  modified_base 57: mod_base = OTHER; note = 2'-O-Methyl-adenosine
  modified_base 61: mod_base = OTHER; note = 2'-O-Methyl-cytidine
  modified_base 66: mod_base = OTHER; note = 2'-O-Methyl-uridine
  modified_base 67: mod_base = OTHER; note = 2'-O-Methyl-cytidine
  modified_base 70: mod_base = OTHER; note = 2'-O-Methyl-cytidine
  modified_base 71: mod_base = OTHER; note = 2'-O-Methyl-uridine
  modified_base 72: mod_base = OTHER; note = 2'-O-Methyl-uridine
  modified_base 73: mod_base = OTHER; note = 2'-O-Methyl-guanosine
  modified_base 74: mod_base = OTHER; note = 2'-O-Methyl-adenosine
  modified_base 75: mod_base = OTHER; note = 2'-O-Methyl-adenosine
  modified_base 76: mod_base = OTHER; note = 2'-O-Methyl-adenosine
  modified_base 77: mod_base = OTHER; note = 2'-O-Methyl-adenosine
  modified_base 78: mod_base = OTHER; note = 2'-O-Methyl-adenosine
  modified_base 79: mod_base = OTHER; note = 2'-O-Methyl-guanosine
  modified_base 80: mod_base = OTHER; note = 2'-O-Methyl-uridine
  modified_base 82: mod_base = OTHER; note = 2'-O-Methyl-guanosine
  modified_base 83: mod_base = OTHER; note = 2'-O-Methyl-cytidine
  modified_base 84: mod_base = OTHER; note = 2'-O-Methyl-adenosine
  modified_base 85: mod_base = OTHER; note = 2'-O-Methyl-cytidine
  modified_base 86: mod_base = OTHER; note = 2'-O-Methyl-cytidine
  modified_base 87: mod_base = OTHER; note = 2'-O-Methyl-guanosine
  modified_base 89: mod_base = OTHER; note = 2'-O-Methyl-guanosine
  modified_base 91: mod_base = OTHER; note = 2'-O-Methyl-cytidine
  modified_base 92: mod_base = OTHER; note = 2'-O-Methyl-guanosine
  modified_base 93: mod_base = OTHER; note = 2'-O-Methyl-guanosine
  modified_base 94: mod_base = OTHER; note = 2'-O-Methyl-uridine
  modified_base 95: mod_base = OTHER; note = 2'-O-Methyl-guanosine
  modified_base 96: mod_base = OTHER; note = 2'-O-Methyl-cytidine
  modified_base 97: mod_base = OTHER; note = 2'-O-Methyl-uridine
  modified_base 98: mod_base = OTHER; note = 2'-O-Methyl-uridine phosphorothioate
  modified_base 99: mod_base = OTHER; note = 2'-O-Methyl-uridine phosphorothioate
  modified_base 100: mod_base = OTHER; note = 2'-O-Methyl-uridine

SEQ ID NO: 2683 - RNA, 103 nt, synthetic construct; identical to SEQ ID NO: 1700
  source 1..103: mol_type = other RNA
  modified_base 1: mod_base = OTHER; note = 2'-O-Methyl-cytidine phosphorothioate
  modified_base 2: mod_base = OTHER; note = 2'-O-Methyl-adenosine phosphorothioate
  modified_base 3: mod_base = OTHER; note = 2'-O-Methyl-guanosine
  modified_base 21: mod_base = OTHER; note = 2'-O-Methyl-guanosine
  modified_base 28: mod_base = OTHER; note = 2'-O-Methyl-adenosine
  modified_base 29: mod_base = OTHER; note = 2'-O-Methyl-guanosine
  modified_base 30: mod_base = OTHER; note = 2'-O-Methyl-cytidine
  modified_base 31: mod_base = OTHER; note = 2'-O-Methyl-uridine
  modified_base 32: mod_base = OTHER; note = 2'-O-Methyl-adenosine
  modified_base 34: mod_base = OTHER; note = 2'-O-Methyl-adenosine
  modified_base 35: mod_base = OTHER; note = 2'-O-Methyl-adenosine
  modified_base 36: mod_base = OTHER; note = 2'-O-Methyl-adenosine
  modified_base 37: mod_base = OTHER; note = 2'-O-Methyl-uridine
  modified_base 38: mod_base = OTHER; note = 2'-O-Methyl-adenosine
  modified_base 39: mod_base = OTHER; note = 2'-O-Methyl-guanosine
  modified_base 40: mod_base = OTHER; note = 2'-O-Methyl-cytidine
  modified_base 41: mod_base = OTHER; note = 2'-O-Methyl-adenosine
  modified_base 42: mod_base = OTHER; note = 2'-O-Methyl-adenosine
  modified_base 46: mod_base = OTHER; note = 2'-O-Methyl-adenosine
  modified_base 48: mod_base = OTHER; note = 2'-O-Methyl-adenosine
  modified_base 50: mod_base = OTHER; note = 2'-O-Methyl-uridine
  modified_base 52: mod_base = OTHER; note = 2'-O-Methyl-adenosine
  modified_base 53: mod_base = OTHER; note = 2'-O-Methyl-guanosine
  modified_base 54: mod_base = OTHER; note = 2'-O-Methyl-guanosine
  modified_base 57: mod_base = OTHER; note = 2'-O-Methyl-adenosine
  modified_base 61: mod_base = OTHER; note = 2'-O-Methyl-cytidine
  modified_base 66: mod_base = OTHER; note = 2'-O-Methyl-uridine
  modified_base 67: mod_base = OTHER; note = 2'-O-Methyl-cytidine
  modified_base 70: mod_base = OTHER; note = 2'-O-Methyl-cytidine
  modified_base 71: mod_base = OTHER; note = 2'-O-Methyl-uridine
  modified_base 72: mod_base = OTHER; note = 2'-O-Methyl-uridine
  modified_base 73: mod_base = OTHER; note = 2'-O-Methyl-guanosine
  modified_base 74: mod_base = OTHER; note = 2'-O-Methyl-adenosine
  modified_base 75: mod_base = OTHER; note = 2'-O-Methyl-adenosine
  modified_base 76: mod_base = OTHER; note = 2'-O-Methyl-adenosine
  modified_base 77: mod_base = OTHER; note = 2'-O-Methyl-adenosine
  modified_base 78: mod_base = OTHER; note = 2'-O-Methyl-adenosine
  modified_base 79: mod_base = OTHER; note = 2'-O-Methyl-guanosine
  modified_base 80: mod_base = OTHER; note = 2'-O-Methyl-uridine
  modified_base 82: mod_base = OTHER; note = 2'-O-Methyl-guanosine
  modified_base 83: mod_base = OTHER; note = 2'-O-Methyl-cytidine
  modified_base 84: mod_base = OTHER; note = 2'-O-Methyl-adenosine
  modified_base 85: mod_base = OTHER; note = 2'-O-Methyl-cytidine
  modified_base 86: mod_base = OTHER; note = 2'-O-Methyl-cytidine
  modified_base 87: mod_base = OTHER; note = 2'-O-Methyl-guanosine
  modified_base 89: mod_base = OTHER; note = 2'-O-Methyl-guanosine
  modified_base 92: mod_base = OTHER; note = 2'-O-Methyl-guanosine
  modified_base 93: mod_base = OTHER; note = 2'-O-Methyl-guanosine
  modified_base 94: mod_base = OTHER; note = 2'-O-Methyl-uridine
  modified_base 95: mod_base = OTHER; note = 2'-O-Methyl-guanosine
  modified_base 96: mod_base = OTHER; note = 2'-O-Methyl-cytidine
  modified_base 97: mod_base = OTHER; note = 2'-O-Methyl-uridine
  modified_base 98: mod_base = OTHER; note = 2'-O-Methyl-uridine phosphorothioate
  modified_base 99: mod_base = OTHER; note = 2'-O-Methyl-uridine phosphorothioate
  modified_base 100: mod_base = OTHER; note = 2'-O-Methyl-uridine

SEQ ID NO: 2684 - RNA, 103 nt, synthetic construct; identical to SEQ ID NO: 1700
  source 1..103: mol_type = other RNA
  modified_base 1: mod_base = OTHER; note = 2'-O-Methyl-cytidine phosphorothioate
  modified_base 2: mod_base = OTHER; note = 2'-O-Methyl-adenosine phosphorothioate
  modified_base 3: mod_base = OTHER; note = 2'-O-Methyl-guanosine
  modified_base 21: mod_base = OTHER; note = 2'-O-Methyl-guanosine
  modified_base 28: mod_base = OTHER; note = 2'-O-Methyl-adenosine
  modified_base 29: mod_base = OTHER; note = 2'-O-Methyl-guanosine
  modified_base 30: mod_base = OTHER; note = 2'-O-Methyl-cytidine
  modified_base 31: mod_base = OTHER; note = 2'-O-Methyl-uridine
  modified_base 32: mod_base = OTHER; note = 2'-O-Methyl-adenosine
  modified_base 34: mod_base = OTHER; note = 2'-O-Methyl-adenosine
  modified_base 35: mod_base = OTHER; note = 2'-O-Methyl-adenosine
  modified_base 36: mod_base = OTHER; note = 2'-O-Methyl-adenosine
  modified_base 37: mod_base = OTHER; note = 2'-O-Methyl-uridine
  modified_base 38: mod_base = OTHER; note = 2'-O-Methyl-adenosine
  modified_base 39: mod_base = OTHER; note = 2'-O-Methyl-guanosine
  modified_base 40: mod_base = OTHER; note = 2'-O-Methyl-cytidine
  modified_base 41: mod_base = OTHER; note = 2'-O-Methyl-adenosine
  modified_base 42: mod_base = OTHER; note = 2'-O-Methyl-adenosine
  modified_base 46: mod_base = OTHER; note = 2'-O-Methyl-adenosine
  modified_base 48: mod_base = OTHER; note = 2'-O-Methyl-adenosine
  modified_base 50: mod_base = OTHER; note = 2'-O-Methyl-uridine
  modified_base 52: mod_base = OTHER; note = 2'-O-Methyl-adenosine
  modified_base 53: mod_base = OTHER; note = 2'-O-Methyl-guanosine
  modified_base 54: mod_base = OTHER; note = 2'-O-Methyl-guanosine
  modified_base 57: mod_base = OTHER; note = 2'-O-Methyl-adenosine
  modified_base 61: mod_base = OTHER; note = 2'-O-Methyl-cytidine
  modified_base 66: mod_base = OTHER; note = 2'-O-Methyl-uridine
  modified_base 67: mod_base = OTHER; note = 2'-O-Methyl-cytidine
  modified_base 70: mod_base = OTHER; note = 2'-O-Methyl-cytidine
  modified_base 71: mod_base = OTHER; note = 2'-O-Methyl-uridine
  modified_base 72: mod_base = OTHER; note = 2'-O-Methyl-uridine
  modified_base 73: mod_base = OTHER; note = 2'-O-Methyl-guanosine
  modified_base 74: mod_base = OTHER; note = 2'-O-Methyl-adenosine
  modified_base 75: mod_base = OTHER; note = 2'-O-Methyl-adenosine
  modified_base 76: mod_base = OTHER; note = 2'-O-Methyl-adenosine
  modified_base 77: mod_base = OTHER; note = 2'-O-Methyl-adenosine
  modified_base 78: mod_base = OTHER; note = 2'-O-Methyl-adenosine
  modified_base 79: mod_base = OTHER; note = 2'-O-Methyl-guanosine
  modified_base 80: mod_base = OTHER; note = 2'-O-Methyl-uridine
  modified_base 82: mod_base = OTHER; note = 2'-O-Methyl-guanosine
  modified_base 83: mod_base = OTHER; note = 2'-O-Methyl-cytidine
  modified_base 84: mod_base = OTHER; note = 2'-O-Methyl-adenosine
  modified_base 85: mod_base = OTHER; note = 2'-O-Methyl-cytidine
  modified_base 86: mod_base = OTHER; note = 2'-O-Methyl-cytidine
  modified_base 87: mod_base = OTHER; note = 2'-O-Methyl-guanosine
  modified_base 89: mod_base = OTHER; note = 2'-O-Methyl-guanosine
  modified_base 91: mod_base = OTHER; note = 2'-O-Methyl-cytidine
  modified_base 92: mod_base = OTHER; note = 2'-O-Methyl-guanosine
  modified_base 93: mod_base = OTHER; note = 2'-O-Methyl-guanosine
  modified_base 94: mod_base = OTHER; note = 2'-O-Methyl-uridine
  modified_base 95: mod_base = OTHER; note = 2'-O-Methyl-guanosine
  modified_base 96: mod_base = OTHER; note = 2'-O-Methyl-cytidine
  modified_base 97: mod_base = OTHER; note = 2'-O-Methyl-uridine
  modified_base 98: mod_base = OTHER; note = 2'-O-Methyl-uridine phosphorothioate
  modified_base 99: mod_base = OTHER; note = 2'-O-Methyl-uridine phosphorothioate
  modified_base 100: mod_base = OTHER; note = 2'-O-Methyl-uridine

SEQ ID NO: 2685 - RNA, 103 nt, synthetic construct; identical to SEQ ID NO: 1700
  source 1..103: mol_type = other RNA
  modified_base 1: mod_base = OTHER; note = 2'-O-Methyl-cytidine phosphorothioate
  modified_base 2: mod_base = OTHER; note = 2'-O-Methyl-adenosine phosphorothioate
  modified_base 3: mod_base = OTHER; note = 2'-O-Methyl-guanosine
  modified_base 21: mod_base = OTHER; note = 2'-O-Methyl-guanosine
  modified_base 28: mod_base = OTHER; note = 2'-O-Methyl-adenosine
  modified_base 29: mod_base = OTHER; note = 2'-O-Methyl-guanosine
  modified_base 30: mod_base = OTHER; note = 2'-O-Methyl-cytidine
  modified_base 31: mod_base = OTHER; note = 2'-O-Methyl-uridine
  modified_base 32: mod_base = OTHER; note = 2'-O-Methyl-adenosine
  modified_base 34: mod_base = OTHER; note = 2'-O-Methyl-adenosine
  modified_base 35: mod_base = OTHER; note = 2'-O-Methyl-adenosine
  modified_base 36: mod_base = OTHER; note = 2'-O-Methyl-adenosine
  modified_base 37: mod_base = OTHER; note = 2'-O-Methyl-uridine
  modified_base 38: mod_base = OTHER; note = 2'-O-Methyl-adenosine
  modified_base 39: mod_base = OTHER; note = 2'-O-Methyl-guanosine
  modified_base 40: mod_base = OTHER; note = 2'-O-Methyl-cytidine
  modified_base 41: mod_base = OTHER; note = 2'-O-Methyl-adenosine
  modified_base 42: mod_base = OTHER; note = 2'-O-Methyl-adenosine
  modified_base 46: mod_base = OTHER; note = 2'-O-Methyl-adenosine
  modified_base 48: mod_base = OTHER; note = 2'-O-Methyl-adenosine
  modified_base 50: mod_base = OTHER; note = 2'-O-Methyl-uridine
  modified_base 52: mod_base = OTHER; note = 2'-O-Methyl-adenosine
  modified_base 53: mod_base = OTHER; note = 2'-O-Methyl-guanosine
  modified_base 54: mod_base = OTHER; note = 2'-O-Methyl-guanosine
  modified_base 55: mod_base = OTHER; note = 2'-O-Methyl-cytidine
  modified_base 56: mod_base = OTHER; note = 2'-O-Methyl-uridine
  modified_base 57: mod_base = OTHER; note = 2'-O-Methyl-adenosine
  modified_base 60: mod_base = OTHER; note = 2'-O-Methyl-cytidine
  modified_base 61: mod_base = OTHER; note = 2'-O-Methyl-cytidine
  modified_base 66: mod_base = OTHER; note = 2'-O-Methyl-uridine
  modified_base 67: mod_base = OTHER; note = 2'-O-Methyl-cytidine
  modified_base 70: mod_base = OTHER; note = 2'-O-Methyl-cytidine
  modified_base 71: mod_base = OTHER; note = 2'-O-Methyl-uridine
  modified_base 72: mod_base = OTHER; note = 2'-O-Methyl-uridine
  modified_base 74: mod_base = OTHER; note = 2'-O-Methyl-adenosine
  modified_base 75: mod_base = OTHER; note = 2'-O-Methyl-adenosine
  modified_base 76: mod_base = OTHER; note = 2'-O-Methyl-adenosine
  modified_base 77: mod_base = OTHER; note = 2'-O-Methyl-adenosine
  modified_base 78: mod_base = OTHER; note = 2'-O-Methyl-adenosine
  modified_base 79: mod_base = OTHER; note = 2'-O-Methyl-guanosine
  modified_base 80: mod_base = OTHER; note = 2'-O-Methyl-uridine
  modified_base 82: mod_base = OTHER; note = 2'-O-Methyl-guanosine
  modified_base 83: mod_base = OTHER; note = 2'-O-Methyl-cytidine
  modified_base 84: mod_base = OTHER; note = 2'-O-Methyl-adenosine
  modified_base 85: mod_base = OTHER; note = 2'-O-Methyl-cytidine
  modified_base 86: mod_base = OTHER; note = 2'-O-Methyl-cytidine
  modified_base 87: mod_base = OTHER; note = 2'-O-Methyl-guanosine
  modified_base 89: mod_base = OTHER; note = 2'-O-Methyl-guanosine
  modified_base 92: mod_base = OTHER; note = 2'-O-Methyl-guanosine
  modified_base 93: mod_base = OTHER; note = 2'-O-Methyl-guanosine
  modified_base 94: mod_base = OTHER; note = 2'-O-Methyl-uridine
  modified_base 95: mod_base = OTHER; note = 2'-O-Methyl-guanosine
  modified_base 96: mod_base = OTHER; note = 2'-O-Methyl-cytidine
  modified_base 97: mod_base = OTHER; note = 2'-O-Methyl-uridine
  modified_base 98: mod_base = OTHER; note = 2'-O-Methyl-uridine phosphorothioate
  modified_base 99: mod_base = OTHER; note = 2'-O-Methyl-uridine phosphorothioate
  modified_base 100: mod_base = OTHER; note = 2'-O-Methyl-uridine

SEQ ID NO: 2686 - RNA, 103 nt, synthetic construct; identical to SEQ ID NO: 1643
  source 1..103: mol_type = other RNA
  modified_base 1: mod_base = OTHER; note = 2'-O-Methyl-cytidine phosphorothioate
  modified_base 2: mod_base = OTHER; note = 2'-O-Methyl-cytidine phosphorothioate
  modified_base 3: mod_base = OTHER; note = 2'-O-Methyl-cytidine
  modified_base 21: mod_base = OTHER; note = 2'-O-Methyl-guanosine
  modified_base 28: mod_base = OTHER; note = 2'-O-Methyl-adenosine
  modified_base 29: mod_base = OTHER; note = 2'-O-Methyl-guanosine
  modified_base 30: mod_base = OTHER; note = 2'-O-Methyl-cytidine
  modified_base 31: mod_base = OTHER; note = 2'-O-Methyl-uridine
  modified_base 32: mod_base = OTHER; note = 2'-O-Methyl-adenosine
  modified_base 33: mod_base = OTHER; note = 2'-O-Methyl-guanosine
  modified_base 34: mod_base = OTHER; note = 2'-O-Methyl-adenosine
  modified_base 35: mod_base = OTHER; note = 2'-O-Methyl-adenosine
  modified_base 36: mod_base = OTHER; note = 2'-O-Methyl-adenosine
  modified_base 37: mod_base = OTHER; note = 2'-O-Methyl-uridine
  modified_base 38: mod_base = OTHER; note = 2'-O-Methyl-adenosine
  modified_base 39: mod_base = OTHER; note = 2'-O-Methyl-guanosine
  modified_base 40: mod_base = OTHER; note = 2'-O-Methyl-cytidine
  modified_base 41: mod_base = OTHER; note = 2'-O-Methyl-adenosine
  modified_base 42: mod_base = OTHER; note = 2'-O-Methyl-adenosine
  modified_base 46: mod_base = OTHER; note = 2'-O-Methyl-adenosine
  modified_base 48: mod_base = OTHER; note = 2'-O-Methyl-adenosine
  modified_base 50: mod_base = OTHER; note = 2'-O-Methyl-uridine
  modified_base 52: mod_base = OTHER; note = 2'-O-Methyl-adenosine
  modified_base 53: mod_base = OTHER; note = 2'-O-Methyl-guanosine
  modified_base 54: mod_base = OTHER; note = 2'-O-Methyl-guanosine
  modified_base 55: mod_base = OTHER; note = 2'-O-Methyl-cytidine
  modified_base 56: mod_base = OTHER; note = 2'-O-Methyl-uridine
  modified_base 57: mod_base = OTHER; note = 2'-O-Methyl-adenosine
  modified_base 60: mod_base = OTHER; note = 2'-O-Methyl-cytidine
  modified_base 61: mod_base = OTHER; note = 2'-O-Methyl-cytidine
  modified_base 64: mod_base = OTHER; note = uridine phosphorothioate
  modified_base 66: mod_base = OTHER; note = 2'-O-Methyl-uridine
  modified_base 67: mod_base = OTHER; note = 2'-O-Methyl-cytidine
  modified_base 70: mod_base = OTHER; note = 2'-O-Methyl-cytidine
  modified_base 71: mod_base = OTHER; note = 2'-O-Methyl-uridine
  modified_base 72: mod_base = OTHER; note = 2'-O-Methyl-uridine
  modified_base 73: mod_base = OTHER; note = 2'-O-Methyl-guanosine
  modified_base 74: mod_base = OTHER; note = 2'-O-Methyl-adenosine
  modified_base 75: mod_base = OTHER; note = 2'-O-Methyl-adenosine
  modified_base 76: mod_base = OTHER; note = 2'-O-Methyl-adenosine
  modified_base 77: mod_base = OTHER; note = 2'-O-Methyl-adenosine
  modified_base 78: mod_base = OTHER; note = 2'-O-Methyl-adenosine
  modified_base 79: mod_base = OTHER; note = 2'-O-Methyl-guanosine
  modified_base 80: mod_base = OTHER; note = 2'-O-Methyl-uridine
  modified_base 81: mod_base = OTHER; note = 2'-O-Methyl-guanosine
  modified_base 83: mod_base = OTHER; note = 2'-O-Methyl-cytidine
  modified_base 84: mod_base = OTHER; note = 2'-O-Methyl-adenosine
  modified_base 85: mod_base = OTHER; note = 2'-O-Methyl-cytidine
  modified_base 86: mod_base = OTHER; note = 2'-O-Methyl-cytidine
  modified_base 87: mod_base = OTHER; note = 2'-O-Methyl-guanosine
  modified_base 88: mod_base = OTHER; note = 2'-O-Methyl-adenosine
  modified_base 89: mod_base = OTHER; note = 2'-O-Methyl-guanosine
  modified_base 90: mod_base = OTHER; note = 2'-O-Methyl-uridine
  modified_base 91: mod_base = OTHER; note = 2'-O-Methyl-cytidine
  modified_base 92: mod_base = OTHER; note = 2'-O-Methyl-guanosine
  modified_base 93: mod_base = OTHER; note = 2'-O-Methyl-guanosine
  modified_base 94: mod_base = OTHER; note = 2'-O-Methyl-uridine
  modified_base 95: mod_base = OTHER; note = 2'-O-Methyl-guanosine
  modified_base 96: mod_base = OTHER; note = 2'-O-Methyl-cytidine
  modified_base 97: mod_base = OTHER; note = 2'-O-Methyl-uridine
  modified_base 98: mod_base = OTHER; note = 2'-O-Methyl-uridine phosphorothioate
  modified_base 99: mod_base = OTHER; note = 2'-O-Methyl-uridine phosphorothioate
  modified_base 100: mod_base = OTHER; note = 2'-O-Methyl-uridine

SEQ ID NO: 2687 - RNA, 103 nt, synthetic construct; identical to SEQ ID NO: 1643
  source 1..103: mol_type = other RNA
  modified_base 1: mod_base = OTHER; note = 2'-O-Methyl-cytidine phosphorothioate
  modified_base 2: mod_base = OTHER; note = 2'-O-Methyl-cytidine phosphorothioate
  modified_base 3: mod_base = OTHER; note = 2'-O-Methyl-cytidine
  modified_base 21: mod_base = OTHER; note = 2'-O-Methyl-guanosine
  modified_base 28: mod_base = OTHER; note = 2'-O-Methyl-adenosine
  modified_base 29: mod_base = OTHER; note = 2'-O-Methyl-guanosine
  modified_base 30: mod_base = OTHER; note = 2'-O-Methyl-cytidine
  modified_base 31: mod_base = OTHER; note = 2'-O-Methyl-uridine
  modified_base 32: mod_base = OTHER; note = 2'-O-Methyl-adenosine
  modified_base 34: mod_base = OTHER; note = 2'-O-Methyl-adenosine
  modified_base 35: mod_base = OTHER; note = 2'-O-Methyl-adenosine
  modified_base 36: mod_base = OTHER; note = 2'-O-Methyl-adenosine
  modified_base 37: mod_base = OTHER; note = 2'-O-Methyl-uridine
  modified_base 38: mod_base = OTHER; note = 2'-O-Methyl-adenosine
  modified_base 39: mod_base = OTHER; note = 2'-O-Methyl-guanosine
  modified_base 40: mod_base = OTHER; note = 2'-O-Methyl-cytidine
  modified_base 41: mod_base = OTHER; note = 2'-O-Methyl-adenosine
  modified_base 42: mod_base = OTHER; note = 2'-O-Methyl-adenosine
  modified_base 46: mod_base = OTHER; note = 2'-O-Methyl-adenosine
  modified_base 48: mod_base = OTHER; note = 2'-O-Methyl-adenosine
  modified_base 50: mod_base = OTHER; note = 2'-O-Methyl-uridine
  modified_base 52: mod_base = OTHER; note = 2'-O-Methyl-adenosine
  modified_base 53: mod_base = OTHER; note = 2'-O-Methyl-guanosine
  modified_base 54: mod_base = OTHER; note = 2'-O-Methyl-guanosine
  modified_base 55: mod_base = OTHER; note = 2'-O-Methyl-cytidine
  modified_base 56: mod_base = OTHER; note = 2'-O-Methyl-uridine
  modified_base 57: mod_base = OTHER; note = 2'-O-Methyl-adenosine
  modified_base 60: mod_base = OTHER; note = 2'-O-Methyl-cytidine
  modified_base 61: mod_base = OTHER; note = 2'-O-Methyl-cytidine
  modified_base 64: mod_base = OTHER; note = uridine phosphorothioate
  modified_base 66: mod_base = OTHER; note = 2'-O-Methyl-uridine
  modified_base 67: mod_base = OTHER; note = 2'-O-Methyl-cytidine
  modified_base 70: mod_base = OTHER; note = 2'-O-Methyl-cytidine
  modified_base 71: mod_base = OTHER; note = 2'-O-Methyl-uridine
  modified_base 72: mod_base = OTHER; note = 2'-O-Methyl-uridine
  modified_base 74: mod_base = OTHER; note = 2'-O-Methyl-adenosine
  modified_base 75: mod_base = OTHER; note = 2'-O-Methyl-adenosine
  modified_base 76: mod_base = OTHER; note = 2'-O-Methyl-adenosine
  modified_base 77: mod_base = OTHER; note = 2'-O-Methyl-adenosine
  modified_base 78: mod_base = OTHER; note = 2'-O-Methyl-adenosine
  modified_base 79: mod_base = OTHER; note = 2'-O-Methyl-guanosine
  modified_base 80: mod_base = OTHER; note = 2'-O-Methyl-uridine
  modified_base 81: mod_base = OTHER; note = 2'-O-Methyl-guanosine
  modified_base 83: mod_base = OTHER; note = 2'-O-Methyl-cytidine
  modified_base 84: mod_base = OTHER; note = 2'-O-Methyl-adenosine
  modified_base 85: mod_base = OTHER; note = 2'-O-Methyl-cytidine
  modified_base 86: mod_base = OTHER; note = 2'-O-Methyl-cytidine
  modified_base 87: mod_base = OTHER; note = 2'-O-Methyl-guanosine
  modified_base 88: mod_base = OTHER; note = 2'-O-Methyl-adenosine
  modified_base 89: mod_base = OTHER; note = 2'-O-Methyl-guanosine
  modified_base 90: mod_base = OTHER; note = 2'-O-Methyl-uridine
  modified_base 91: mod_base = OTHER; note = 2'-O-Methyl-cytidine
  modified_base 92: mod_base = OTHER; note = 2'-O-Methyl-guanosine
  modified_base 93: mod_base = OTHER; note = 2'-O-Methyl-guanosine
  modified_base 94: mod_base = OTHER; note = 2'-O-Methyl-uridine
  modified_base 95: mod_base = OTHER; note = 2'-O-Methyl-guanosine
  modified_base 96: mod_base = OTHER; note = 2'-O-Methyl-cytidine
  modified_base 97: mod_base = OTHER; note = 2'-O-Methyl-uridine
  modified_base 98: mod_base = OTHER; note = 2'-O-Methyl-uridine phosphorothioate
  modified_base 99: mod_base = OTHER; note = 2'-O-Methyl-uridine phosphorothioate
  modified_base 100: mod_base = OTHER; note = 2'-O-Methyl-uridine

SEQ ID NO: 2688 - RNA, 103 nt, synthetic construct; identical to SEQ ID NO: 1699
  source 1..103: mol_type = other RNA
  modified_base 1: mod_base = OTHER; note = 2'-O-Methyl-guanosine phosphorothioate
  modified_base 2: mod_base = OTHER; note = 2'-O-Methyl-adenosine phosphorothioate
  modified_base 3: mod_base = OTHER; note = 2'-O-Methyl-guanosine
  modified_base 21: mod_base = OTHER; note = 2'-O-Methyl-guanosine
  modified_base 28: mod_base = OTHER; note = 2'-O-Methyl-adenosine
  modified_base 29: mod_base = OTHER; note = 2'-O-Methyl-guanosine
  modified_base 30: mod_base = OTHER; note = 2'-O-Methyl-cytidine
  modified_base 31: mod_base = OTHER; note = 2'-O-Methyl-uridine
  modified_base 32: mod_base = OTHER; note = 2'-O-Methyl-adenosine
  modified_base 33: mod_base = OTHER; note = 2'-O-Methyl-guanosine
  modified_base 34: mod_base = OTHER; note = 2'-O-Methyl-adenosine
  modified_base 35: mod_base = OTHER; note = 2'-O-Methyl-adenosine
  modified_base 36: mod_base = OTHER; note = 2'-O-Methyl-adenosine
  modified_base 37: mod_base = OTHER; note = 2'-O-Methyl-uridine
  modified_base 38: mod_base = OTHER; note = 2'-O-Methyl-adenosine
  modified_base 39: mod_base = OTHER; note = 2'-O-Methyl-guanosine
  modified_base 40: mod_base = OTHER; note = 2'-O-Methyl-cytidine
  modified_base 41: mod_base = OTHER; note = 2'-O-Methyl-adenosine
  modified_base 42: mod_base = OTHER; note = 2'-O-Methyl-adenosine
  modified_base 46: mod_base = OTHER; note = 2'-O-Methyl-adenosine
  modified_base 48: mod_base = OTHER; note = 2'-O-Methyl-adenosine
  modified_base 50: mod_base = OTHER; note = 2'-O-Methyl-uridine
  modified_base 52: mod_base = OTHER; note = 2'-O-Methyl-adenosine
  modified_base 53: mod_base = OTHER; note = 2'-O-Methyl-guanosine
  modified_base 54: mod_base = OTHER; note = 2'-O-Methyl-guanosine
  modified_base 55: mod_base = OTHER; note = 2'-O-Methyl-cytidine
  modified_base 56: mod_base = OTHER; note = 2'-O-Methyl-uridine
  modified_base 57: mod_base = OTHER; note = 2'-O-Methyl-adenosine
  modified_base 60: mod_base = OTHER; note = 2'-O-Methyl-cytidine
  modified_base 61: mod_base = OTHER; note = 2'-O-Methyl-cytidine
  modified_base 64: mod_base = OTHER; note = uridine phosphorothioate
  modified_base 66: mod_base = OTHER; note = 2'-O-Methyl-uridine
  modified_base 67: mod_base = OTHER; note = 2'-O-Methyl-cytidine
  modified_base 70: mod_base = OTHER; note = 2'-O-Methyl-cytidine
  modified_base 71: mod_base = OTHER; note = 2'-O-Methyl-uridine
  modified_base 72: mod_base = OTHER; note = 2'-O-Methyl-uridine
  modified_base 73: mod_base = OTHER; note = 2'-O-Methyl-guanosine
  modified_base 74: mod_base = OTHER; note = 2'-O-Methyl-adenosine
  modified_base 75: mod_base = OTHER; note = 2'-O-Methyl-adenosine
  modified_base 76: mod_base = OTHER; note = 2'-O-Methyl-adenosine
  modified_base 77: mod_base = OTHER; note = 2'-O-Methyl-adenosine
  modified_base 78: mod_base = OTHER; note = 2'-O-Methyl-adenosine
  modified_base 79: mod_base = OTHER; note = 2'-O-Methyl-guanosine
  modified_base 80: mod_base = OTHER; note = 2'-O-Methyl-uridine
  modified_base 81: mod_base = OTHER; note = 2'-O-Methyl-guanosine
  modified_base 83: mod_base = OTHER; note = 2'-O-Methyl-cytidine
  modified_base 84: mod_base = OTHER; note = 2'-O-Methyl-adenosine
  modified_base 85: mod_base = OTHER; note = 2'-O-Methyl-cytidine
  modified_base 86: mod_base = OTHER; note = 2'-O-Methyl-cytidine
  modified_base 87: mod_base = OTHER; note = 2'-O-Methyl-guanosine
  modified_base 88: mod_base = OTHER; note = 2'-O-Methyl-adenosine
  modified_base 89: mod_base = OTHER; note = 2'-O-Methyl-guanosine
  modified_base 90: mod_base = OTHER; note = 2'-O-Methyl-uridine
  modified_base 91: mod_base = OTHER; note = 2'-O-Methyl-cytidine
  modified_base 92: mod_base = OTHER; note = 2'-O-Methyl-guanosine
  modified_base 93: mod_base = OTHER; note = 2'-O-Methyl-guanosine
  modified_base 94: mod_base = OTHER; note = 2'-O-Methyl-uridine
  modified_base 95: mod_base = OTHER; note = 2'-O-Methyl-guanosine
  modified_base 96: mod_base = OTHER; note = 2'-O-Methyl-cytidine
  modified_base 97: mod_base = OTHER; note = 2'-O-Methyl-uridine
  modified_base 98: mod_base = OTHER; note = 2'-O-Methyl-uridine phosphorothioate
  modified_base 99: mod_base = OTHER; note = 2'-O-Methyl-uridine phosphorothioate
  modified_base 100: mod_base = OTHER; note = 2'-O-Methyl-uridine

SEQ ID NO: 2689 - RNA, 103 nt, synthetic construct; identical to SEQ ID NO: 1699
  source 1..103: mol_type = other RNA
  modified_base 1: mod_base = OTHER; note = 2'-O-Methyl-guanosine phosphorothioate
  modified_base 2: mod_base = OTHER; note = 2'-O-Methyl-adenosine phosphorothioate
  modified_base 3: mod_base = OTHER; note = 2'-O-Methyl-guanosine
  modified_base 21: mod_base = OTHER; note = 2'-O-Methyl-guanosine
  modified_base 28: mod_base = OTHER; note = 2'-O-Methyl-adenosine
  modified_base 29: mod_base = OTHER; note = 2'-O-Methyl-guanosine
  modified_base 30: mod_base = OTHER; note = 2'-O-Methyl-cytidine
  modified_base 31: mod_base = OTHER; note = 2'-O-Methyl-uridine
  modified_base 32: mod_base = OTHER; note = 2'-O-Methyl-adenosine
  modified_base 34: mod_base = OTHER; note = 2'-O-Methyl-adenosine
  modified_base 35: mod_base = OTHER; note = 2'-O-Methyl-adenosine
  modified_base 36: mod_base = OTHER; note = 2'-O-Methyl-adenosine
  modified_base 37: mod_base = OTHER; note = 2'-O-Methyl-uridine
  modified_base 38: mod_base = OTHER; note = 2'-O-Methyl-adenosine
  modified_base 39: mod_base = OTHER; note = 2'-O-Methyl-guanosine
  modified_base 40: mod_base = OTHER; note = 2'-O-Methyl-cytidine
  modified_base 41: mod_base = OTHER; note = 2'-O-Methyl-adenosine
  modified_base 42: mod_base = OTHER; note = 2'-O-Methyl-adenosine
  modified_base 46: mod_base = OTHER; note = 2'-O-Methyl-adenosine
  modified_base 48: mod_base = OTHER; note = 2'-O-Methyl-adenosine
  modified_base 50: mod_base = OTHER; note = 2'-O-Methyl-uridine
  modified_base 52: mod_base = OTHER; note = 2'-O-Methyl-adenosine
  modified_base 53: mod_base = OTHER; note = 2'-O-Methyl-guanosine
  modified_base 54: mod_base = OTHER; note = 2'-O-Methyl-guanosine
  modified_base 55: mod_base = OTHER; note = 2'-O-Methyl-cytidine
  modified_base 56: mod_base = OTHER; note = 2'-O-Methyl-uridine
  modified_base 57: mod_base = OTHER; note = 2'-O-Methyl-adenosine
  modified_base 60: mod_base = OTHER; note = 2'-O-Methyl-cytidine
  modified_base 61: mod_base = OTHER; note = 2'-O-Methyl-cytidine
  modified_base 64: mod_base = OTHER; note = uridine phosphorothioate
  modified_base 66: mod_base = OTHER; note = 2'-O-Methyl-uridine
  modified_base 67: mod_base = OTHER; note = 2'-O-Methyl-cytidine
  modified_base 70: mod_base = OTHER; note = 2'-O-Methyl-cytidine
  modified_base 71: mod_base = OTHER; note = 2'-O-Methyl-uridine
  modified_base 72: mod_base = OTHER; note = 2'-O-Methyl-uridine
  modified_base 74: mod_base = OTHER; note = 2'-O-Methyl-adenosine
  modified_base 75: mod_base = OTHER; note = 2'-O-Methyl-adenosine
  modified_base 76: mod_base = OTHER; note = 2'-O-Methyl-adenosine
  modified_base 77: mod_base = OTHER; note = 2'-O-Methyl-adenosine
  modified_base 78: mod_base = OTHER; note = 2'-O-Methyl-adenosine
  modified_base 79: mod_base = OTHER; note = 2'-O-Methyl-guanosine
  modified_base 80: mod_base = OTHER; note = 2'-O-Methyl-uridine
  modified_base 81: mod_base = OTHER; note = 2'-O-Methyl-guanosine
  modified_base 83: mod_base = OTHER; note = 2'-O-Methyl-cytidine
  modified_base 84: mod_base = OTHER; note = 2'-O-Methyl-adenosine
  modified_base 85: mod_base = OTHER; note = 2'-O-Methyl-cytidine
  modified_base 86: mod_base = OTHER; note = 2'-O-Methyl-cytidine
  modified_base 87: mod_base = OTHER; note = 2'-O-Methyl-guanosine
  modified_base 88: mod_base = OTHER; note = 2'-O-Methyl-adenosine
  modified_base 89: mod_base = OTHER; note = 2'-O-Methyl-guanosine
  modified_base 90: mod_base = OTHER; note = 2'-O-Methyl-uridine
  modified_base 91: mod_base = OTHER; note = 2'-O-Methyl-cytidine
  modified_base 92: mod_base = OTHER; note = 2'-O-Methyl-guanosine
  modified_base 93: mod_base = OTHER; note = 2'-O-Methyl-guanosine
  modified_base 94: mod_base = OTHER; note = 2'-O-Methyl-uridine
  modified_base 95: mod_base = OTHER; note = 2'-O-Methyl-guanosine
  modified_base 96: mod_base = OTHER; note = 2'-O-Methyl-cytidine
  modified_base 97: mod_base = OTHER; note = 2'-O-Methyl-uridine
  modified_base 98: mod_base = OTHER; note = 2'-O-Methyl-uridine phosphorothioate
  modified_base 99: mod_base = OTHER; note = 2'-O-Methyl-uridine phosphorothioate
  modified_base 100: mod_base = OTHER; note = 2'-O-Methyl-uridine

SEQ ID NO: 2690 - RNA, 103 nt, synthetic construct; identical to SEQ ID NO: 1700
  source 1..103: mol_type = other RNA
  modified_base 1: mod_base = OTHER; note = 2'-O-Methyl-cytidine phosphorothioate
  modified_base 2: mod_base = OTHER; note = 2'-O-Methyl-adenosine phosphorothioate
  modified_base 3: mod_base = OTHER; note = 2'-O-Methyl-guanosine
  modified_base 21: mod_base = OTHER; note = 2'-O-Methyl-guanosine
  modified_base 28: mod_base = OTHER; note = 2'-O-Methyl-adenosine
  modified_base 29: mod_base = OTHER; note = 2'-O-Methyl-guanosine
  modified_base 30: mod_base = OTHER; note = 2'-O-Methyl-cytidine
  modified_base 31: mod_base = OTHER; note = 2'-O-Methyl-uridine
  modified_base 32: mod_base = OTHER; note = 2'-O-Methyl-adenosine
  modified_base 33: mod_base = OTHER; note = 2'-O-Methyl-guanosine
  modified_base 34: mod_base = OTHER; note = 2'-O-Methyl-adenosine
  modified_base 35: mod_base = OTHER; note = 2'-O-Methyl-adenosine
  modified_base 36: mod_base = OTHER; note = 2'-O-Methyl-adenosine
  modified_base 37: mod_base = OTHER; note = 2'-O-Methyl-uridine
  modified_base 38: mod_base = OTHER; note = 2'-O-Methyl-adenosine
  modified_base 39: mod_base = OTHER; note = 2'-O-Methyl-guanosine
  modified_base 40: mod_base = OTHER; note = 2'-O-Methyl-cytidine
  modified_base 41: mod_base = OTHER; note = 2'-O-Methyl-adenosine
  modified_base 42: mod_base = OTHER; note = 2'-O-Methyl-adenosine
  modified_base 46: mod_base = OTHER; note = 2'-O-Methyl-adenosine
  modified_base 48: mod_base = OTHER; note = 2'-O-Methyl-adenosine
  modified_base 50: mod_base = OTHER; note = 2'-O-Methyl-uridine
  modified_base 52: mod_base = OTHER; note = 2'-O-Methyl-adenosine
  modified_base 53: mod_base = OTHER; note = 2'-O-Methyl-guanosine
  modified_base 54: mod_base = OTHER; note = 2'-O-Methyl-guanosine
  modified_base 57: mod_base = OTHER; note = 2'-O-Methyl-adenosine
  modified_base 61: mod_base = OTHER; note = 2'-O-Methyl-cytidine
  modified_base 64: mod_base = OTHER; note = uridine phosphorothioate
  modified_base 66: mod_base = OTHER; note = 2'-O-Methyl-uridine
  modified_base 67: mod_base = OTHER; note = 2'-O-Methyl-cytidine
  modified_base 70: mod_base = OTHER; note = 2'-O-Methyl-cytidine
  modified_base 71: mod_base = OTHER; note = 2'-O-Methyl-uridine
  modified_base 72: mod_base = OTHER; note = 2'-O-Methyl-uridine
  modified_base 74: mod_base = OTHER; note = 2'-O-Methyl-adenosine
  modified_base 75: mod_base = OTHER; note = 2'-O-Methyl-adenosine
  modified_base 76: mod_base = OTHER; note = 2'-O-Methyl-adenosine
  modified_base 77: mod_base = OTHER; note = 2'-O-Methyl-adenosine
  modified_base 78: mod_base = OTHER; note = 2'-O-Methyl-adenosine
  modified_base 79: mod_base = OTHER; note = 2'-O-Methyl-guanosine
  modified_base 80: mod_base = OTHER; note = 2'-O-Methyl-uridine
  modified_base 82: mod_base = OTHER; note = 2'-O-Methyl-guanosine
  modified_base 83: mod_base = OTHER; note = 2'-O-Methyl-cytidine
  modified_base 84: mod_base = OTHER; note = 2'-O-Methyl-adenosine
  modified_base 85: mod_base = OTHER; note = 2'-O-Methyl-cytidine
  modified_base 86: mod_base = OTHER; note = 2'-O-Methyl-cytidine
  modified_base 87: mod_base = OTHER; note = 2'-O-Methyl-guanosine
  modified_base 89: mod_base = OTHER; note = 2'-O-Methyl-guanosine
  modified_base 92: mod_base = OTHER; note = 2'-O-Methyl-guanosine
  modified_base 93: mod_base = OTHER; note = 2'-O-Methyl-guanosine
  modified_base 94: mod_base = OTHER; note = 2'-O-Methyl-uridine
  modified_base 95: mod_base = OTHER; note = 2'-O-Methyl-guanosine
  modified_base 96: mod_base = OTHER; note = 2'-O-Methyl-cytidine
  modified_base 97: mod_base = OTHER; note = 2'-O-Methyl-uridine
  modified_base 98: mod_base = OTHER; note = 2'-O-Methyl-uridine phosphorothioate
  modified_base 99: mod_base = OTHER; note = 2'-O-Methyl-uridine phosphorothioate
  modified_base 100: mod_base = OTHER; note = 2'-O-Methyl-uridine

SEQ ID NO: 2691 - RNA, 103 nt, synthetic construct; identical to SEQ ID NO: 1700
  source 1..103: mol_type = other RNA
  modified_base 1: mod_base = OTHER; note = 2'-O-Methyl-cytidine phosphorothioate
  modified_base 2: mod_base = OTHER; note = 2'-O-Methyl-adenosine phosphorothioate
  modified_base 3: mod_base = OTHER; note = 2'-O-Methyl-guanosine
  modified_base 21: mod_base = OTHER; note = 2'-O-Methyl-guanosine
  modified_base 28: mod_base = OTHER; note = 2'-O-Methyl-adenosine
  modified_base 29: mod_base = OTHER; note = 2'-O-Methyl-guanosine
  modified_base 30: mod_base = OTHER; note = 2'-O-Methyl-cytidine
  modified_base 31: mod_base = OTHER; note = 2'-O-Methyl-uridine
  modified_base 32: mod_base = OTHER; note = 2'-O-Methyl-adenosine
  modified_base 33: mod_base = OTHER; note = 2'-O-Methyl-guanosine
  modified_base 34: mod_base = OTHER; note = 2'-O-Methyl-adenosine
  modified_base 35: mod_base = OTHER; note = 2'-O-Methyl-adenosine
  modified_base 36: mod_base = OTHER; note = 2'-O-Methyl-adenosine
  modified_base 37: mod_base = OTHER; note = 2'-O-Methyl-uridine
  modified_base 38: mod_base = OTHER; note = 2'-O-Methyl-adenosine
  modified_base 39: mod_base = OTHER; note = 2'-O-Methyl-guanosine
  modified_base 40: mod_base = OTHER; note = 2'-O-Methyl-cytidine
  modified_base 41: mod_base = OTHER; note = 2'-O-Methyl-adenosine
  modified_base 42: mod_base = OTHER; note = 2'-O-Methyl-adenosine
  modified_base 46: mod_base = OTHER; note = 2'-O-Methyl-adenosine
  modified_base 48: mod_base = OTHER; note = 2'-O-Methyl-adenosine
  modified_base 50: mod_base = OTHER; note = 2'-O-Methyl-uridine
  modified_base 52: mod_base = OTHER; note = 2'-O-Methyl-adenosine
  modified_base 53: mod_base = OTHER; note = 2'-O-Methyl-guanosine
  modified_base 54: mod_base = OTHER; note = 2'-O-Methyl-guanosine
  modified_base 55: mod_base = OTHER; note = 2'-O-Methyl-cytidine
  modified_base 56: mod_base = OTHER; note = 2'-O-Methyl-uridine
  modified_base 57: mod_base = OTHER; note = 2'-O-Methyl-adenosine
  modified_base 60: mod_base = OTHER; note = 2'-O-Methyl-cytidine
  modified_base 61: mod_base = OTHER; note = 2'-O-Methyl-cytidine
  modified_base 64: mod_base = OTHER; note = uridine phosphorothioate
  modified_base 66: mod_base = OTHER; note = 2'-O-Methyl-uridine
  modified_base 67: mod_base = OTHER; note = 2'-O-Methyl-cytidine
  modified_base 70: mod_base = OTHER; note = 2'-O-Methyl-cytidine
  modified_base 71: mod_base = OTHER; note = 2'-O-Methyl-uridine
  modified_base 72: mod_base = OTHER; note = 2'-O-Methyl-uridine
  modified_base 74: mod_base = OTHER; note = 2'-O-Methyl-adenosine
  modified_base 75: mod_base = OTHER; note = 2'-O-Methyl-adenosine
  modified_base 76: mod_base = OTHER; note = 2'-O-Methyl-adenosine
  modified_base 77: mod_base = OTHER; note = 2'-O-Methyl-adenosine
  modified_base 78: mod_base = OTHER; note = 2'-O-Methyl-adenosine
  modified_base 79: mod_base = OTHER; note = 2'-O-Methyl-guanosine
  modified_base 80: mod_base = OTHER; note = 2'-O-Methyl-uridine
  modified_base 82: mod_base = OTHER; note = 2'-O-Methyl-guanosine
  modified_base 83: mod_base = OTHER; note = 2'-O-Methyl-cytidine
  modified_base 84: mod_base = OTHER; note = 2'-O-Methyl-adenosine
  modified_base 85: mod_base = OTHER; note = 2'-O-Methyl-cytidine
  modified_base 86: mod_base = OTHER; note = 2'-O-Methyl-cytidine
  modified_base 87: mod_base = OTHER; note = 2'-O-Methyl-guanosine
  modified_base 89: mod_base = OTHER; note = 2'-O-Methyl-guanosine
  modified_base 92: mod_base = OTHER; note = 2'-O-Methyl-guanosine
  modified_base 93: mod_base = OTHER; note = 2'-O-Methyl-guanosine
  modified_base 94: mod_base = OTHER; note = 2'-O-Methyl-uridine
  modified_base 95: mod_base = OTHER; note = 2'-O-Methyl-guanosine
  modified_base 96: mod_base = OTHER; note = 2'-O-Methyl-cytidine
  modified_base 97: mod_base = OTHER; note = 2'-O-Methyl-uridine
  modified_base 98: mod_base = OTHER; note = 2'-O-Methyl-uridine phosphorothioate
  modified_base 99: mod_base = OTHER; note = 2'-O-Methyl-uridine phosphorothioate
  modified_base 100: mod_base = OTHER; note = 2'-O-Methyl-uridine

SEQ ID NO: 2692 - RNA, 103 nt, synthetic construct; identical to SEQ ID NO: 1700
  source 1..103: mol_type = other RNA
  modified_base 1: mod_base = OTHER; note = 2'-O-Methyl-cytidine phosphorothioate
  modified_base 2: mod_base = OTHER; note = 2'-O-Methyl-adenosine phosphorothioate
  modified_base 3: mod_base = OTHER; note = 2'-O-Methyl-guanosine
  modified_base 21: mod_base = OTHER; note = 2'-O-Methyl-guanosine
  modified_base 28: mod_base = OTHER; note = 2'-O-Methyl-adenosine
  modified_base 29: mod_base = OTHER; note = 2'-O-Methyl-guanosine
  modified_base 30: mod_base = OTHER; note = 2'-O-Methyl-cytidine
  modified_base 31: mod_base = OTHER; note = 2'-O-Methyl-uridine
  modified_base 32: mod_base = OTHER; note = 2'-O-Methyl-adenosine
  modified_base 33: mod_base = OTHER; note = 2'-O-Methyl-guanosine
  modified_base 34: mod_base = OTHER; note = 2'-O-Methyl-adenosine
  modified_base 35: mod_base = OTHER; note = 2'-O-Methyl-adenosine
  modified_base 36: mod_base = OTHER; note = 2'-O-Methyl-adenosine
  modified_base 37: mod_base = OTHER; note = 2'-O-Methyl-uridine
  modified_base 38: mod_base = OTHER; note = 2'-O-Methyl-adenosine
  modified_base 39: mod_base = OTHER; note = 2'-O-Methyl-guanosine
  modified_base 40: mod_base = OTHER; note = 2'-O-Methyl-cytidine
  modified_base 41: mod_base = OTHER; note = 2'-O-Methyl-adenosine
  modified_base 42: mod_base = OTHER; note = 2'-O-Methyl-adenosine
  modified_base 46: mod_base = OTHER; note = 2'-O-Methyl-adenosine
  modified_base 48: mod_base = OTHER; note = 2'-O-Methyl-adenosine
  modified_base 50: mod_base = OTHER; note = 2'-O-Methyl-uridine
  modified_base 52: mod_base = OTHER; note = 2'-O-Methyl-adenosine
  modified_base 53: mod_base = OTHER; note = 2'-O-Methyl-guanosine
  modified_base 54: mod_base = OTHER; note = 2'-O-Methyl-guanosine
  modified_base 57: mod_base = OTHER; note = 2'-O-Methyl-adenosine
  modified_base 61: mod_base = OTHER; note = 2'-O-Methyl-cytidine
  modified_base 64: mod_base = OTHER; note = uridine phosphorothioate
  modified_base 66: mod_base = OTHER; note = 2'-O-Methyl-uridine
  modified_base 67: mod_base = OTHER; note = 2'-O-Methyl-cytidine
  modified_base 70: mod_base = OTHER; note = 2'-O-Methyl-cytidine
  modified_base 71: mod_base = OTHER; note = 2'-O-Methyl-uridine
  modified_base 72: mod_base = OTHER; note = 2'-O-Methyl-uridine
  modified_base 73: mod_base = OTHER; note = 2'-O-Methyl-guanosine
  modified_base 74: mod_base = OTHER; note = 2'-O-Methyl-adenosine
  modified_base 75: mod_base = OTHER; note = 2'-O-Methyl-adenosine
  modified_base 76: mod_base = OTHER; note = 2'-O-Methyl-adenosine
  modified_base 77: mod_base = OTHER; note = 2'-O-Methyl-adenosine
  modified_base 78: mod_base = OTHER; note = 2'-O-Methyl-adenosine
  modified_base 79: mod_base = OTHER; note = 2'-O-Methyl-guanosine
  modified_base 80: mod_base = OTHER; note = 2'-O-Methyl-uridine
  modified_base 82: mod_base = OTHER; note = 2'-O-Methyl-guanosine
  modified_base 83: mod_base = OTHER; note = 2'-O-Methyl-cytidine
  modified_base 84: mod_base = OTHER; note = 2'-O-Methyl-adenosine
  modified_base 85: mod_base = OTHER; note = 2'-O-Methyl-cytidine
  modified_base 86: mod_base = OTHER; note = 2'-O-Methyl-cytidine
  modified_base 87: mod_base = OTHER; note = 2'-O-Methyl-guanosine
  modified_base 89: mod_base = OTHER; note = 2'-O-Methyl-guanosine
  modified_base 92: mod_base = OTHER; note = 2'-O-Methyl-guanosine
  modified_base 93: mod_base = OTHER; note = 2'-O-Methyl-guanosine
  modified_base 94: mod_base = OTHER; note = 2'-O-Methyl-uridine
  modified_base 95: mod_base = OTHER; note = 2'-O-Methyl-guanosine
  modified_base 96: mod_base = OTHER; note = 2'-O-Methyl-cytidine
  modified_base 97: mod_base = OTHER; note = 2'-O-Methyl-uridine
  modified_base 98: mod_base = OTHER; note = 2'-O-Methyl-uridine phosphorothioate
  modified_base 99: mod_base = OTHER; note = 2'-O-Methyl-uridine phosphorothioate
  modified_base 100: mod_base = OTHER; note = 2'-O-Methyl-uridine

SEQ ID NO: 2693 - RNA, 103 nt, synthetic construct; identical to SEQ ID NO: 1700
  source 1..103: mol_type = other RNA
  modified_base 1: mod_base = OTHER; note = 2'-O-Methyl-cytidine phosphorothioate
  modified_base 2: mod_base = OTHER; note = 2'-O-Methyl-adenosine phosphorothioate
  modified_base 3: mod_base = OTHER; note = 2'-O-Methyl-guanosine
  modified_base 21: mod_base = OTHER; note = 2'-O-Methyl-guanosine
  modified_base 28: mod_base = OTHER; note = 2'-O-Methyl-adenosine
  modified_base 29: mod_base = OTHER; note = 2'-O-Methyl-guanosine
  modified_base 30: mod_base = OTHER; note = 2'-O-Methyl-cytidine
  modified_base 31: mod_base = OTHER; note = 2'-O-Methyl-uridine
  modified_base 32: mod_base = OTHER; note = 2'-O-Methyl-adenosine
  modified_base 33: mod_base = OTHER; note = 2'-O-Methyl-guanosine
  modified_base 34: mod_base = OTHER; note = 2'-O-Methyl-adenosine
  modified_base 35: mod_base = OTHER; note = 2'-O-Methyl-adenosine
  modified_base 36: mod_base = OTHER; note = 2'-O-Methyl-adenosine
  modified_base 37: mod_base = OTHER; note = 2'-O-Methyl-uridine
  modified_base 38: mod_base = OTHER; note = 2'-O-Methyl-adenosine
  modified_base 39: mod_base = OTHER; note = 2'-O-Methyl-guanosine
  modified_base 40: mod_base = OTHER; note = 2'-O-Methyl-cytidine
  modified_base 41: mod_base = OTHER; note = 2'-O-Methyl-adenosine
  modified_base 42: mod_base = OTHER; note = 2'-O-Methyl-adenosine
  modified_base 46: mod_base = OTHER; note = 2'-O-Methyl-adenosine
  modified_base 48: mod_base = OTHER; note = 2'-O-Methyl-adenosine
  modified_base 50: mod_base = OTHER; note = 2'-O-Methyl-uridine
  modified_base 52: mod_base = OTHER; note = 2'-O-Methyl-adenosine
  modified_base 53: mod_base = OTHER; note = 2'-O-Methyl-guanosine
  modified_base 54: mod_base = OTHER; note = 2'-O-Methyl-guanosine
  modified_base 57: mod_base = OTHER; note = 2'-O-Methyl-adenosine
  modified_base 61: mod_base = OTHER; note = 2'-O-Methyl-cytidine
  modified_base 64: mod_base = OTHER; note = uridine phosphorothioate
  modified_base 66: mod_base = OTHER; note = 2'-O-Methyl-uridine
  modified_base 67: mod_base = OTHER; note = 2'-O-Methyl-cytidine
  modified_base 70: mod_base = OTHER; note = 2'-O-Methyl-cytidine
  modified_base 71: mod_base = OTHER; note = 2'-O-Methyl-uridine
  modified_base 72: mod_base = OTHER; note = 2'-O-Methyl-uridine
  modified_base 73: mod_base = OTHER; note = 2'-O-Methyl-guanosine
  modified_base 74: mod_base = OTHER; note = 2'-O-Methyl-adenosine
  modified_base 75: mod_base = OTHER; note = 2'-O-Methyl-adenosine
  modified_base 76: mod_base = OTHER; note = 2'-O-Methyl-adenosine
  modified_base 77: mod_base = OTHER; note = 2'-O-Methyl-adenosine
  modified_base 78: mod_base = OTHER; note = 2'-O-Methyl-adenosine
  modified_base 79: mod_base = OTHER; note = 2'-O-Methyl-guanosine
  modified_base 80: mod_base = OTHER; note = 2'-O-Methyl-uridine
  modified_base 82: mod_base = OTHER; note = 2'-O-Methyl-guanosine
  modified_base 83: mod_base = OTHER; note = 2'-O-Methyl-cytidine
  modified_base 84: mod_base = OTHER; note = 2'-O-Methyl-adenosine
  modified_base 85: mod_base = OTHER; note = 2'-O-Methyl-cytidine
  modified_base 86: mod_base = OTHER; note = 2'-O-Methyl-cytidine
  modified_base 87: mod_base = OTHER; note = 2'-O-Methyl-guanosine
  modified_base 89: mod_base = OTHER; note = 2'-O-Methyl-guanosine
  modified_base 91: mod_base = OTHER; note = 2'-O-Methyl-cytidine
  modified_base 92: mod_base = OTHER; note = 2'-O-Methyl-guanosine
  modified_base 93: mod_base = OTHER; note = 2'-O-Methyl-guanosine
  modified_base 94: mod_base = OTHER; note = 2'-O-Methyl-uridine
  modified_base 95: mod_base = OTHER; note = 2'-O-Methyl-guanosine
  modified_base 96: mod_base = OTHER; note = 2'-O-Methyl-cytidine
  modified_base 97: mod_base = OTHER; note = 2'-O-Methyl-uridine
  modified_base 98: mod_base = OTHER; note = 2'-O-Methyl-uridine phosphorothioate
  modified_base 99: mod_base = OTHER; note = 2'-O-Methyl-uridine phosphorothioate
  modified_base 100: mod_base = OTHER; note = 2'-O-Methyl-uridine

SEQ ID NO: 2694 - RNA, 103 nt, synthetic construct; identical to SEQ ID NO: 1700
  source 1..103: mol_type = other RNA
  modified_base 1: mod_base = OTHER; note = 2'-O-Methyl-cytidine phosphorothioate
  modified_base 2: mod_base = OTHER; note = 2'-O-Methyl-adenosine phosphorothioate
  modified_base 3: mod_base = OTHER; note = 2'-O-Methyl-guanosine
  modified_base 21: mod_base = OTHER; note = 2'-O-Methyl-guanosine
  modified_base 28: mod_base = OTHER; note = 2'-O-Methyl-adenosine
  modified_base 29: mod_base = OTHER; note = 2'-O-Methyl-guanosine
  modified_base 30: mod_base = OTHER; note = 2'-O-Methyl-cytidine
  modified_base 31: mod_base = OTHER; note = 2'-O-Methyl-uridine
  modified_base 32: mod_base = OTHER; note = 2'-O-Methyl-adenosine
  modified_base 34: mod_base = OTHER; note = 2'-O-Methyl-adenosine
  modified_base 35: mod_base = OTHER; note = 2'-O-Methyl-adenosine
  modified_base 36: mod_base = OTHER; note = 2'-O-Methyl-adenosine
  modified_base 37: mod_base = OTHER; note = 2'-O-Methyl-uridine
  modified_base 38: mod_base = OTHER; note = 2'-O-Methyl-adenosine
  modified_base 39: mod_base = OTHER; note = 2'-O-Methyl-guanosine
  modified_base 40: mod_base = OTHER; note = 2'-O-Methyl-cytidine
  modified_base 41: mod_base = OTHER; note = 2'-O-Methyl-adenosine
  modified_base 42: mod_base = OTHER; note = 2'-O-Methyl-adenosine
  modified_base 46: mod_base = OTHER; note = 2'-O-Methyl-adenosine
  modified_base 48: mod_base = OTHER; note = 2'-O-Methyl-adenosine
  modified_base 50: mod_base = OTHER; note = 2'-O-Methyl-uridine
  modified_base 52: mod_base = OTHER; note = 2'-O-Methyl-adenosine
  modified_base 53: mod_base = OTHER; note = 2'-O-Methyl-guanosine
  modified_base 54: mod_base = OTHER; note = 2'-O-Methyl-guanosine
  modified_base 57: mod_base = OTHER; note = 2'-O-Methyl-adenosine
  modified_base 61: mod_base = OTHER; note = 2'-O-Methyl-cytidine
  modified_base 64: mod_base = OTHER; note = uridine phosphorothioate
  modified_base 66: mod_base = OTHER; note = 2'-O-Methyl-uridine
  modified_base 67: mod_base = OTHER; note = 2'-O-Methyl-cytidine
  modified_base 70: mod_base = OTHER; note = 2'-O-Methyl-cytidine
  modified_base 71: mod_base = OTHER; note = 2'-O-Methyl-uridine
  modified_base 72: mod_base = OTHER; note = 2'-O-Methyl-uridine
  modified_base 73: mod_base = OTHER; note = 2'-O-Methyl-guanosine
  modified_base 74: mod_base = OTHER; note = 2'-O-Methyl-adenosine
  modified_base 75: mod_base = OTHER; note = 2'-O-Methyl-adenosine
  modified_base 76: mod_base = OTHER; note = 2'-O-Methyl-adenosine
  modified_base 77: mod_base = OTHER; note = 2'-O-Methyl-adenosine
  modified_base 78: mod_base = OTHER; note = 2'-O-Methyl-adenosine
  modified_base 79: mod_base = OTHER; note = 2'-O-Methyl-guanosine
  modified_base 80: mod_base = OTHER; note = 2'-O-Methyl-uridine
  modified_base 82: mod_base = OTHER; note = 2'-O-Methyl-guanosine
  modified_base 83: mod_base = OTHER; note = 2'-O-Methyl-cytidine
  modified_base 84: mod_base = OTHER; note = 2'-O-Methyl-adenosine
  modified_base 85: mod_base = OTHER; note = 2'-O-Methyl-cytidine
  modified_base 86: mod_base = OTHER; note = 2'-O-Methyl-cytidine
  modified_base 87: mod_base = OTHER; note = 2'-O-Methyl-guanosine
  modified_base 89: mod_base = OTHER; note = 2'-O-Methyl-guanosine
  modified_base 92: mod_base = OTHER; note = 2'-O-Methyl-guanosine
  modified_base 93: mod_base = OTHER; note = 2'-O-Methyl-guanosine
  modified_base 94: mod_base = OTHER; note = 2'-O-Methyl-uridine
  modified_base 95: mod_base = OTHER; note = 2'-O-Methyl-guanosine
  modified_base 96: mod_base = OTHER; note = 2'-O-Methyl-cytidine
  modified_base 97: mod_base = OTHER; note = 2'-O-Methyl-uridine
  modified_base 98: mod_base = OTHER; note = 2'-O-Methyl-uridine phosphorothioate
  modified_base 99: mod_base = OTHER; note = 2'-O-Methyl-uridine phosphorothioate
  modified_base 100: mod_base = OTHER; note = 2'-O-Methyl-uridine

SEQ ID NO: 2695 - RNA, 103 nt, synthetic construct; identical to SEQ ID NO: 1700
  source 1..103: mol_type = other RNA
  modified_base 1: mod_base = OTHER; note = 2'-O-Methyl-cytidine phosphorothioate
  modified_base 2: mod_base = OTHER; note = 2'-O-Methyl-adenosine phosphorothioate
  modified_base 3: mod_base = OTHER; note = 2'-O-Methyl-guanosine
  modified_base 21: mod_base = OTHER; note = 2'-O-Methyl-guanosine
  modified_base 28: mod_base = OTHER; note = 2'-O-Methyl-adenosine
  modified_base 29: mod_base = OTHER; note = 2'-O-Methyl-guanosine
  modified_base 30: mod_base = OTHER; note = 2'-O-Methyl-cytidine
  modified_base 31: mod_base = OTHER; note = 2'-O-Methyl-uridine
  modified_base 32: mod_base = OTHER; note = 2'-O-Methyl-adenosine
  modified_base 34: mod_base = OTHER; note = 2'-O-Methyl-adenosine
  modified_base 35: mod_base = OTHER; note = 2'-O-Methyl-adenosine
  modified_base 36: mod_base = OTHER; note = 2'-O-Methyl-adenosine
  modified_base 37: mod_base = OTHER; note = 2'-O-Methyl-uridine
  modified_base 38: mod_base = OTHER; note = 2'-O-Methyl-adenosine
  modified_base 39: mod_base = OTHER; note = 2'-O-Methyl-guanosine
  modified_base 40: mod_base = OTHER; note = 2'-O-Methyl-cytidine
  modified_base 41: mod_base = OTHER; note = 2'-O-Methyl-adenosine
  modified_base 42: mod_base = OTHER; note = 2'-O-Methyl-adenosine
  modified_base 46: mod_base = OTHER; note = 2'-O-Methyl-adenosine
  modified_base 48: mod_base = OTHER; note = 2'-O-Methyl-adenosine
  modified_base 50: mod_base = OTHER; note = 2'-O-Methyl-uridine
  modified_base 52: mod_base = OTHER; note = 2'-O-Methyl-adenosine
  modified_base 53: mod_base = OTHER; note = 2'-O-Methyl-guanosine
  modified_base 54: mod_base = OTHER; note = 2'-O-Methyl-guanosine
  modified_base 57: mod_base = OTHER; note = 2'-O-Methyl-adenosine
  modified_base 61: mod_base = OTHER; note = 2'-O-Methyl-cytidine
  modified_base 64: mod_base = OTHER; note = uridine phosphorothioate
  modified_base 66: mod_base = OTHER; note = 2'-O-Methyl-uridine
  modified_base 67: mod_base = OTHER; note = 2'-O-Methyl-cytidine
  modified_base 70: mod_base = OTHER; note = 2'-O-Methyl-cytidine
  modified_base 71: mod_base = OTHER; note = 2'-O-Methyl-uridine
  modified_base 72: mod_base = OTHER; note = 2'-O-Methyl-uridine
  modified_base 73: mod_base = OTHER; note = 2'-O-Methyl-guanosine
  modified_base 74: mod_base = OTHER; note = 2'-O-Methyl-adenosine
  modified_base 75: mod_base = OTHER; note = 2'-O-Methyl-adenosine
  modified_base 76: mod_base = OTHER; note = 2'-O-Methyl-adenosine
  modified_base 77: mod_base = OTHER; note = 2'-O-Methyl-adenosine
  modified_base 78: mod_base = OTHER; note = 2'-O-Methyl-adenosine
  modified_base 79: mod_base = OTHER; note = 2'-O-Methyl-guanosine
  modified_base 80: mod_base = OTHER; note = 2'-O-Methyl-uridine
  modified_base 82: mod_base = OTHER; note = 2'-O-Methyl-guanosine
  modified_base 83: mod_base = OTHER; note = 2'-O-Methyl-cytidine
  modified_base 84: mod_base = OTHER; note = 2'-O-Methyl-adenosine
  modified_base 85: mod_base = OTHER; note = 2'-O-Methyl-cytidine
  modified_base 86: mod_base = OTHER; note = 2'-O-Methyl-cytidine
  modified_base 87: mod_base = OTHER; note = 2'-O-Methyl-guanosine
  modified_base 89: mod_base = OTHER; note = 2'-O-Methyl-guanosine
  modified_base 91: mod_base = OTHER; note = 2'-O-Methyl-cytidine
  modified_base 92: mod_base = OTHER; note = 2'-O-Methyl-guanosine
  modified_base 93: mod_base = OTHER; note = 2'-O-Methyl-guanosine
  modified_base 94: mod_base = OTHER; note = 2'-O-Methyl-uridine
  modified_base 95: mod_base = OTHER; note = 2'-O-Methyl-guanosine
  modified_base 96: mod_base = OTHER; note = 2'-O-Methyl-cytidine
  modified_base 97: mod_base = OTHER; note = 2'-O-Methyl-uridine
  modified_base 98: mod_base = OTHER; note = 2'-O-Methyl-uridine phosphorothioate
  modified_base 99: mod_base = OTHER; note = 2'-O-Methyl-uridine phosphorothioate
  modified_base 100: mod_base = OTHER; note = 2'-O-Methyl-uridine

SEQ ID NO: 2696 - RNA, 103 nt, synthetic construct; identical to SEQ ID NO: 1700
  source 1..103: mol_type = other RNA
  modified_base 1: mod_base = OTHER; note = 2'-O-Methyl-cytidine phosphorothioate
  modified_base 2: mod_base = OTHER; note = 2'-O-Methyl-adenosine phosphorothioate
  modified_base 3: mod_base = OTHER; note = 2'-O-Methyl-guanosine
  modified_base 21: mod_base = OTHER; note = 2'-O-Methyl-guanosine
  modified_base 28: mod_base = OTHER; note = 2'-O-Methyl-adenosine
  modified_base 29: mod_base = OTHER; note = 2'-O-Methyl-guanosine
  modified_base 30: mod_base = OTHER; note = 2'-O-Methyl-cytidine
  modified_base 31: mod_base = OTHER; note = 2'-O-Methyl-uridine
  modified_base 32: mod_base = OTHER; note = 2'-O-Methyl-adenosine
  modified_base 34: mod_base = OTHER; note = 2'-O-Methyl-adenosine
  modified_base 35: mod_base = OTHER; note = 2'-O-Methyl-adenosine
  modified_base 36: mod_base = OTHER; note = 2'-O-Methyl-adenosine
  modified_base 37: mod_base = OTHER; note = 2'-O-Methyl-uridine
  modified_base 38: mod_base = OTHER; note = 2'-O-Methyl-adenosine
  modified_base 39: mod_base = OTHER; note = 2'-O-Methyl-guanosine
  modified_base 40: mod_base = OTHER; note = 2'-O-Methyl-cytidine
  modified_base 41: mod_base = OTHER; note = 2'-O-Methyl-adenosine
  modified_base 42: mod_base = OTHER; note = 2'-O-Methyl-adenosine
  modified_base 46: mod_base = OTHER; note = 2'-O-Methyl-adenosine
  modified_base 48: mod_base = OTHER; note = 2'-O-Methyl-adenosine
  modified_base 50: mod_base = OTHER; note = 2'-O-Methyl-uridine
  modified_base 52: mod_base = OTHER; note = 2'-O-Methyl-adenosine
  modified_base 53: mod_base = OTHER; note = 2'-O-Methyl-guanosine
  modified_base 54: mod_base = OTHER; note = 2'-O-Methyl-guanosine
  modified_base 55: mod_base = OTHER; note = 2'-O-Methyl-cytidine
  modified_base 56: mod_base = OTHER; note = 2'-O-Methyl-uridine
  modified_base 57: mod_base = OTHER; note = 2'-O-Methyl-adenosine
  modified_base 60: mod_base = OTHER; note = 2'-O-Methyl-cytidine
  modified_base 61: mod_base = OTHER; note = 2'-O-Methyl-cytidine
  modified_base 64: mod_base = OTHER; note = uridine phosphorothioate
  modified_base 66: mod_base = OTHER; note = 2'-O-Methyl-uridine
  modified_base 67: mod_base = OTHER; note = 2'-O-Methyl-cytidine
  modified_base 70: mod_base = OTHER; note = 2'-O-Methyl-cytidine
  modified_base 71: mod_base = OTHER; note = 2'-O-Methyl-uridine
  modified_base 72: mod_base = OTHER; note = 2'-O-Methyl-uridine
  modified_base 74: mod_base = OTHER; note = 2'-O-Methyl-adenosine
  modified_base 75: mod_base = OTHER; note = 2'-O-Methyl-adenosine
  modified_base 76: mod_base = OTHER; note = 2'-O-Methyl-adenosine
  modified_base 77: mod_base = OTHER; note = 2'-O-Methyl-adenosine
  modified_base 78: mod_base = OTHER; note = 2'-O-Methyl-adenosine
  modified_base 79: mod_base = OTHER; note = 2'-O-Methyl-guanosine
  modified_base 80: mod_base = OTHER; note = 2'-O-Methyl-uridine
  modified_base 82: mod_base = OTHER; note = 2'-O-Methyl-guanosine
  modified_base 83: mod_base = OTHER; note = 2'-O-Methyl-cytidine
  modified_base 84: mod_base = OTHER; note = 2'-O-Methyl-adenosine
  modified_base 85: mod_base = OTHER; note = 2'-O-Methyl-cytidine
  modified_base 86: mod_base = OTHER; note = 2'-O-Methyl-cytidine
  modified_base 87: mod_base = OTHER; note = 2'-O-Methyl-guanosine
  modified_base 89: mod_base = OTHER; note = 2'-O-Methyl-guanosine
  modified_base 92: mod_base = OTHER; note = 2'-O-Methyl-guanosine
  modified_base 93: mod_base = OTHER; note = 2'-O-Methyl-guanosine
  modified_base 94: mod_base = OTHER; note = 2'-O-Methyl-uridine
  modified_base 95: mod_base = OTHER; note = 2'-O-Methyl-guanosine
  modified_base 96: mod_base = OTHER; note = 2'-O-Methyl-cytidine
  modified_base 97: mod_base = OTHER; note = 2'-O-Methyl-uridine
  modified_base 98: mod_base = OTHER; note = 2'-O-Methyl-uridine phosphorothioate
  modified_base 99: mod_base = OTHER; note = 2'-O-Methyl-uridine phosphorothioate
  modified_base 100: mod_base = OTHER; note = 2'-O-Methyl-uridine

SEQ ID NO: 2697 - RNA, 103 nt, synthetic construct; identical to SEQ ID NO: 1643
  source 1..103: mol_type = other RNA
  modified_base 1: mod_base = OTHER; note = 2'-O-Methyl-cytidine phosphorothioate
  modified_base 2: mod_base = OTHER; note = 2'-O-Methyl-cytidine phosphorothioate
  modified_base 3: mod_base = OTHER; note = 2'-O-Methyl-cytidine
  modified_base 21: mod_base = OTHER; note = 2'-O-Methyl-guanosine
  modified_base 28: mod_base = OTHER; note = 2'-O-Methyl-adenosine
  modified_base 29: mod_base = OTHER; note = 2'-O-Methyl-guanosine
  modified_base 30: mod_base = OTHER; note = 2'-O-Methyl-cytidine
  modified_base 31: mod_base = OTHER; note = 2'-O-Methyl-uridine
  modified_base 32: mod_base = OTHER; note = 2'-O-Methyl-adenosine
  modified_base 33: mod_base = OTHER; note = 2'-O-Methyl-guanosine
  modified_base 34: mod_base = OTHER; note = 2'-O-Methyl-adenosine
  modified_base 35: mod_base = OTHER; note = 2'-O-Methyl-adenosine
  modified_base 36: mod_base = OTHER; note = 2'-O-Methyl-adenosine
  modified_base 37: mod_base = OTHER; note = 2'-O-Methyl-uridine
  modified_base 38: mod_base = OTHER; note = 2'-O-Methyl-adenosine
  modified_base 39: mod_base = OTHER; note = 2'-O-Methyl-guanosine
  modified_base 40: mod_base = OTHER; note = 2'-O-Methyl-cytidine
  modified_base 41: mod_base = OTHER; note = 2'-O-Methyl-adenosine
  modified_base 42: mod_base = OTHER; note = 2'-O-Methyl-adenosine
  modified_base 45: mod_base = OTHER; note = uridine phosphorothioate
  modified_base 46: mod_base = OTHER; note = 2'-O-Methyl-adenosine
  modified_base 48: mod_base = OTHER; note = 2'-O-Methyl-adenosine
  modified_base 50: mod_base = OTHER; note = 2'-O-Methyl-uridine
  modified_base 52: mod_base = OTHER; note = 2'-O-Methyl-adenosine
  modified_base 53: mod_base = OTHER; note = 2'-O-Methyl-guanosine
  modified_base 54: mod_base = OTHER; note = 2'-O-Methyl-guanosine
  modified_base 55: mod_base = OTHER; note = 2'-O-Methyl-cytidine
  modified_base 56: mod_base = OTHER; note = 2'-O-Methyl-uridine
  modified_base 57: mod_base = OTHER; note = 2'-O-Methyl-adenosine
  modified_base 60: mod_base = OTHER; note = 2'-O-Methyl-cytidine
  modified_base 61: mod_base = OTHER; note = 2'-O-Methyl-cytidine
  modified_base 66: mod_base = OTHER; note = 2'-O-Methyl-uridine
  modified_base 67: mod_base = OTHER; note = 2'-O-Methyl-cytidine
  modified_base 70: mod_base = OTHER; note = 2'-O-Methyl-cytidine
  modified_base 71: mod_base = OTHER; note = 2'-O-Methyl-uridine
  modified_base 72: mod_base = OTHER; note = 2'-O-Methyl-uridine
  modified_base 73: mod_base = OTHER; note = 2'-O-Methyl-guanosine
  modified_base 74: mod_base = OTHER; note = 2'-O-Methyl-adenosine
  modified_base 75: mod_base = OTHER; note = 2'-O-Methyl-adenosine
  modified_base 76: mod_base = OTHER; note = 2'-O-Methyl-adenosine
  modified_base 77: mod_base = OTHER; note = 2'-O-Methyl-adenosine
  modified_base 78: mod_base = OTHER; note = 2'-O-Methyl-adenosine
  modified_base 79: mod_base = OTHER; note = 2'-O-Methyl-guanosine
  modified_base 80: mod_base = OTHER; note = 2'-O-Methyl-uridine
  modified_base 81: mod_base = OTHER; note = 2'-O-Methyl-guanosine
  modified_base 83: mod_base = OTHER; note = 2'-O-Methyl-cytidine
  modified_base 84: mod_base = OTHER; note = 2'-O-Methyl-adenosine
  modified_base 85: mod_base = OTHER; note = 2'-O-Methyl-cytidine
  modified_base 86: mod_base = OTHER; note = 2'-O-Methyl-cytidine
  modified_base 87: mod_base = OTHER; note = 2'-O-Methyl-guanosine
  modified_base 88: mod_base = OTHER; note = 2'-O-Methyl-adenosine
  modified_base 89: mod_base = OTHER; note = 2'-O-Methyl-guanosine
  modified_base 90: mod_base = OTHER; note = 2'-O-Methyl-uridine
  modified_base 91: mod_base = OTHER; note = 2'-O-Methyl-cytidine
  modified_base 92: mod_base = OTHER; note = 2'-O-Methyl-guanosine
  modified_base 93: mod_base = OTHER; note = 2'-O-Methyl-guanosine
  modified_base 94: mod_base = OTHER; note = 2'-O-Methyl-uridine
  modified_base 95: mod_base = OTHER; note = 2'-O-Methyl-guanosine
  modified_base 96: mod_base = OTHER; note = 2'-O-Methyl-cytidine
  modified_base 97: mod_base = OTHER; note = 2'-O-Methyl-uridine
  modified_base 98: mod_base = OTHER; note = 2'-O-Methyl-uridine phosphorothioate
  modified_base 99: mod_base = OTHER; note = 2'-O-Methyl-uridine phosphorothioate
  modified_base 100: mod_base = OTHER; note = 2'-O-Methyl-uridine

SEQ ID NO: 2698 - RNA, 103 nt, synthetic construct; identical to SEQ ID NO: 1643
  source 1..103: mol_type = other RNA
  modified_base 1: mod_base = OTHER; note = 2'-O-Methyl-cytidine phosphorothioate
  modified_base 2: mod_base = OTHER; note = 2'-O-Methyl-cytidine phosphorothioate
  modified_base 3: mod_base = OTHER; note = 2'-O-Methyl-cytidine
  modified_base 21: mod_base = OTHER; note = 2'-O-Methyl-guanosine
  modified_base 28: mod_base = OTHER; note = 2'-O-Methyl-adenosine
  modified_base 29: mod_base = OTHER; note = 2'-O-Methyl-guanosine
  modified_base 30: mod_base = OTHER; note = 2'-O-Methyl-cytidine
  modified_base 31: mod_base = OTHER; note = 2'-O-Methyl-uridine
  modified_base 32: mod_base = OTHER; note = 2'-O-Methyl-adenosine
  modified_base 34: mod_base = OTHER; note = 2'-O-Methyl-adenosine
  modified_base 35: mod_base = OTHER; note = 2'-O-Methyl-adenosine
  modified_base 36: mod_base = OTHER; note = 2'-O-Methyl-adenosine
  modified_base 37: mod_base = OTHER; note = 2'-O-Methyl-uridine
  modified_base 38: mod_base = OTHER; note = 2'-O-Methyl-adenosine
  modified_base 39: mod_base = OTHER; note = 2'-O-Methyl-guanosine
  modified_base 40: mod_base = OTHER; note = 2'-O-Methyl-cytidine
  modified_base 41: mod_base = OTHER; note = 2'-O-Methyl-adenosine
  modified_base 42: mod_base = OTHER; note = 2'-O-Methyl-adenosine
  modified_base 45: mod_base = OTHER; note = uridine phosphorothioate
  modified_base 46: mod_base = OTHER; note = 2'-O-Methyl-adenosine
  modified_base 48: mod_base = OTHER; note = 2'-O-Methyl-adenosine
  modified_base 50: mod_base = OTHER; note = 2'-O-Methyl-uridine
  modified_base 52: mod_base = OTHER; note = 2'-O-Methyl-adenosine
  modified_base 53: mod_base = OTHER; note = 2'-O-Methyl-guanosine
  modified_base 54: mod_base = OTHER; note = 2'-O-Methyl-guanosine
  modified_base 55: mod_base = OTHER; note = 2'-O-Methyl-cytidine
  modified_base 56: mod_base = OTHER; note = 2'-O-Methyl-uridine
  modified_base 57: mod_base = OTHER; note = 2'-O-Methyl-adenosine
  modified_base 60: mod_base = OTHER; note = 2'-O-Methyl-cytidine
  modified_base 61: mod_base = OTHER; note = 2'-O-Methyl-cytidine
  modified_base 66: mod_base = OTHER; note = 2'-O-Methyl-uridine
  modified_base 67: mod_base = OTHER; note = 2'-O-Methyl-cytidine
  modified_base 70: mod_base = OTHER; note = 2'-O-Methyl-cytidine
  modified_base 71: mod_base = OTHER; note = 2'-O-Methyl-uridine
  modified_base 72: mod_base = OTHER; note = 2'-O-Methyl-uridine
  modified_base 74: mod_base = OTHER; note = 2'-O-Methyl-adenosine
  modified_base 75: mod_base = OTHER; note = 2'-O-Methyl-adenosine
  modified_base 76: mod_base = OTHER; note = 2'-O-Methyl-adenosine
  modified_base 77: mod_base = OTHER; note = 2'-O-Methyl-adenosine
  modified_base 78: mod_base = OTHER; note = 2'-O-Methyl-adenosine
  modified_base 79: mod_base = OTHER; note = 2'-O-Methyl-guanosine
  modified_base 80: mod_base = OTHER; note = 2'-O-Methyl-uridine
  modified_base 81: mod_base = OTHER; note = 2'-O-Methyl-guanosine
  modified_base 83: mod_base = OTHER; note = 2'-O-Methyl-cytidine
  modified_base 84: mod_base = OTHER; note = 2'-O-Methyl-adenosine
  modified_base 85: mod_base = OTHER; note = 2'-O-Methyl-cytidine
  modified_base 86: mod_base = OTHER; note = 2'-O-Methyl-cytidine
  modified_base 87: mod_base = OTHER; note = 2'-O-Methyl-guanosine
  modified_base 88: mod_base = OTHER; note = 2'-O-Methyl-adenosine
  modified_base 89: mod_base = OTHER; note = 2'-O-Methyl-guanosine
  modified_base 90: mod_base = OTHER; note = 2'-O-Methyl-uridine
  modified_base 91: mod_base = OTHER; note = 2'-O-Methyl-cytidine
  modified_base 92: mod_base = OTHER; note = 2'-O-Methyl-guanosine
  modified_base 93: mod_base = OTHER; note = 2'-O-Methyl-guanosine
  modified_base 94: mod_base = OTHER; note = 2'-O-Methyl-uridine
  modified_base 95: mod_base = OTHER; note = 2'-O-Methyl-guanosine
  modified_base 96: mod_base = OTHER; note = 2'-O-Methyl-cytidine
  modified_base 97: mod_base = OTHER; note = 2'-O-Methyl-uridine
  modified_base 98: mod_base = OTHER; note = 2'-O-Methyl-uridine phosphorothioate
  modified_base 99: mod_base = OTHER; note = 2'-O-Methyl-uridine phosphorothioate
  modified_base 100: mod_base = OTHER; note = 2'-O-Methyl-uridine

SEQ ID NO: 2699 - RNA, 103 nt, synthetic construct; identical to SEQ ID NO: 1699
  source 1..103: mol_type = other RNA
  modified_base 1: mod_base = OTHER; note = 2'-O-Methyl-guanosine phosphorothioate
  modified_base 2: mod_base = OTHER; note = 2'-O-Methyl-adenosine phosphorothioate
  modified_base 3: mod_base = OTHER; note = 2'-O-Methyl-guanosine
  modified_base 21: mod_base = OTHER; note = 2'-O-Methyl-guanosine
  modified_base 28: mod_base = OTHER; note = 2'-O-Methyl-adenosine
  modified_base 29: mod_base = OTHER; note = 2'-O-Methyl-guanosine
  modified_base 30: mod_base = OTHER; note = 2'-O-Methyl-cytidine
  modified_base 31: mod_base = OTHER; note = 2'-O-Methyl-uridine
  modified_base 32: mod_base = OTHER; note = 2'-O-Methyl-adenosine
  modified_base 33: mod_base = OTHER; note = 2'-O-Methyl-guanosine
  modified_base 34: mod_base = OTHER; note = 2'-O-Methyl-adenosine
  modified_base 35: mod_base = OTHER; note = 2'-O-Methyl-adenosine
  modified_base 36: mod_base = OTHER; note = 2'-O-Methyl-adenosine
  modified_base 37: mod_base = OTHER; note = 2'-O-Methyl-uridine
  modified_base 38: mod_base = OTHER; note = 2'-O-Methyl-adenosine
  modified_base 39: mod_base = OTHER; note = 2'-O-Methyl-guanosine
  modified_base 40: mod_base = OTHER; note = 2'-O-Methyl-cytidine
  modified_base 41: mod_base = OTHER; note = 2'-O-Methyl-adenosine
  modified_base 42: mod_base = OTHER; note = 2'-O-Methyl-adenosine
  modified_base 45: mod_base = OTHER; note = uridine phosphorothioate
  modified_base 46: mod_base = OTHER; note = 2'-O-Methyl-adenosine
  modified_base 48: mod_base = OTHER; note = 2'-O-Methyl-adenosine
  modified_base 50: mod_base = OTHER; note = 2'-O-Methyl-uridine
  modified_base 52: mod_base = OTHER; note = 2'-O-Methyl-adenosine
  modified_base 53: mod_base = OTHER; note = 2'-O-Methyl-guanosine
  modified_base 54: mod_base = OTHER; note = 2'-O-Methyl-guanosine
  modified_base 55: mod_base = OTHER; note = 2'-O-Methyl-cytidine
  modified_base 56: mod_base = OTHER; note = 2'-O-Methyl-uridine
  modified_base 57: mod_base = OTHER; note = 2'-O-Methyl-adenosine
  modified_base 60: mod_base = OTHER; note = 2'-O-Methyl-cytidine
  modified_base 61: mod_base = OTHER; note = 2'-O-Methyl-cytidine
  modified_base 66: mod_base = OTHER; note = 2'-O-Methyl-uridine
  modified_base 67: mod_base = OTHER; note = 2'-O-Methyl-cytidine
  modified_base 70: mod_base = OTHER; note = 2'-O-Methyl-cytidine
  modified_base 71: mod_base = OTHER; note = 2'-O-Methyl-uridine
  modified_base 72: mod_base = OTHER; note = 2'-O-Methyl-uridine
  modified_base 73: mod_base = OTHER; note = 2'-O-Methyl-guanosine
  modified_base 74: mod_base = OTHER; note = 2'-O-Methyl-adenosine
  modified_base 75: mod_base = OTHER; note = 2'-O-Methyl-adenosine
  modified_base 76: mod_base = OTHER; note = 2'-O-Methyl-adenosine
  modified_base 77: mod_base = OTHER; note = 2'-O-Methyl-adenosine
  modified_base 78: mod_base = OTHER; note = 2'-O-Methyl-adenosine
  modified_base 79: mod_base = OTHER; note = 2'-O-Methyl-guanosine
  modified_base 80: mod_base = OTHER; note = 2'-O-Methyl-uridine
  modified_base 81: mod_base = OTHER; note = 2'-O-Methyl-guanosine
  modified_base 83: mod_base = OTHER; note = 2'-O-Methyl-cytidine
  modified_base 84: mod_base = OTHER; note = 2'-O-Methyl-adenosine
  modified_base 85: mod_base = OTHER; note = 2'-O-Methyl-cytidine
  modified_base 86: mod_base = OTHER; note = 2'-O-Methyl-cytidine
  modified_base 87: mod_base = OTHER; note = 2'-O-Methyl-guanosine
  modified_base 88: mod_base = OTHER; note = 2'-O-Methyl-adenosine
  modified_base 89: mod_base = OTHER; note = 2'-O-Methyl-guanosine
  modified_base 90: mod_base = OTHER; note = 2'-O-Methyl-uridine
  modified_base 91: mod_base = OTHER; note = 2'-O-Methyl-cytidine
  modified_base 92: mod_base = OTHER; note = 2'-O-Methyl-guanosine
  modified_base 93: mod_base = OTHER; note = 2'-O-Methyl-guanosine
  modified_base 94: mod_base = OTHER; note = 2'-O-Methyl-uridine
  modified_base 95: mod_base = OTHER; note = 2'-O-Methyl-guanosine
  modified_base 96: mod_base = OTHER; note = 2'-O-Methyl-cytidine
  modified_base 97: mod_base = OTHER; note = 2'-O-Methyl-uridine
  modified_base 98: mod_base = OTHER; note = 2'-O-Methyl-uridine phosphorothioate
  modified_base 99: mod_base = OTHER; note = 2'-O-Methyl-uridine phosphorothioate
  modified_base 100: mod_base = OTHER; note = 2'-O-Methyl-uridine

SEQ ID NO: 2700 - RNA, 103 nt, synthetic construct; identical to SEQ ID NO: 1700
  source 1..103: mol_type = other RNA
  modified_base 1: mod_base = OTHER; note = 2'-O-Methyl-cytidine phosphorothioate
  modified_base 2: mod_base = OTHER; note = 2'-O-Methyl-adenosine phosphorothioate
  modified_base 3: mod_base = OTHER; note = 2'-O-Methyl-guanosine
  modified_base 21: mod_base = OTHER; note = 2'-O-Methyl-guanosine
  modified_base 28: mod_base = OTHER; note = 2'-O-Methyl-adenosine
  modified_base 29: mod_base = OTHER; note = 2'-O-Methyl-guanosine
  modified_base 30: mod_base = OTHER; note = 2'-O-Methyl-cytidine
  modified_base 31: mod_base = OTHER; note = 2'-O-Methyl-uridine
  modified_base 32: mod_base = OTHER; note = 2'-O-Methyl-adenosine
  modified_base 33: mod_base = OTHER; note = 2'-O-Methyl-guanosine
  modified_base 34: mod_base = OTHER; note = 2'-O-Methyl-adenosine
  modified_base 35: mod_base = OTHER; note = 2'-O-Methyl-adenosine
  modified_base 36: mod_base = OTHER; note = 2'-O-Methyl-adenosine
  modified_base 37: mod_base = OTHER; note = 2'-O-Methyl-uridine
  modified_base 38: mod_base = OTHER; note = 2'-O-Methyl-adenosine
  modified_base 39: mod_base = OTHER; note = 2'-O-Methyl-guanosine
  modified_base 40: mod_base = OTHER; note = 2'-O-Methyl-cytidine
  modified_base 41: mod_base = OTHER; note = 2'-O-Methyl-adenosine
  modified_base 42: mod_base = OTHER; note = 2'-O-Methyl-adenosine
  modified_base 45: mod_base = OTHER; note = uridine phosphorothioate
  modified_base 46: mod_base = OTHER; note = 2'-O-Methyl-adenosine
  modified_base 48: mod_base = OTHER; note = 2'-O-Methyl-adenosine
  modified_base 50: mod_base = OTHER; note = 2'-O-Methyl-uridine
  modified_base 52: mod_base = OTHER; note = 2'-O-Methyl-adenosine
  modified_base 53: mod_base = OTHER; note = 2'-O-Methyl-guanosine
  modified_base 54: mod_base = OTHER; note = 2'-O-Methyl-guanosine
  modified_base 57: mod_base = OTHER; note = 2'-O-Methyl-adenosine
  modified_base 61: mod_base = OTHER; note = 2'-O-Methyl-cytidine
  modified_base 66: mod_base = OTHER; note = 2'-O-Methyl-uridine
  modified_base 67: mod_base = OTHER; note = 2'-O-Methyl-cytidine
  modified_base 70: mod_base = OTHER; note = 2'-O-Methyl-cytidine
  modified_base 71: mod_base = OTHER; note = 2'-O-Methyl-uridine
  modified_base 72: mod_base = OTHER; note = 2'-O-Methyl-uridine
  modified_base 74: mod_base = OTHER; note = 2'-O-Methyl-adenosine
  modified_base 75: mod_base = OTHER; note = 2'-O-Methyl-adenosine
  modified_base 76: mod_base = OTHER; note = 2'-O-Methyl-adenosine
  modified_base 77: mod_base = OTHER; note = 2'-O-Methyl-adenosine
  modified_base 78: mod_base = OTHER; note = 2'-O-Methyl-adenosine
  modified_base 79: mod_base = OTHER; note = 2'-O-Methyl-guanosine
  modified_base 80: mod_base = OTHER; note = 2'-O-Methyl-uridine
  modified_base 82: mod_base = OTHER; note = 2'-O-Methyl-guanosine
  modified_base 83: mod_base = OTHER; note = 2'-O-Methyl-cytidine
  modified_base 84: mod_base = OTHER; note = 2'-O-Methyl-adenosine
  modified_base 85: mod_base = OTHER; note = 2'-O-Methyl-cytidine
  modified_base 86: mod_base = OTHER; note = 2'-O-Methyl-cytidine
  modified_base 87: mod_base = OTHER; note = 2'-O-Methyl-guanosine
  modified_base 89: mod_base = OTHER; note = 2'-O-Methyl-guanosine
  modified_base 92: mod_base = OTHER; note = 2'-O-Methyl-guanosine
  modified_base 93: mod_base = OTHER; note = 2'-O-Methyl-guanosine
  modified_base 94: mod_base = OTHER; note = 2'-O-Methyl-uridine
  modified_base 95: mod_base = OTHER; note = 2'-O-Methyl-guanosine
  modified_base 96: mod_base = OTHER; note = 2'-O-Methyl-cytidine
  modified_base 97: mod_base = OTHER; note = 2'-O-Methyl-uridine
  modified_base 98: mod_base = OTHER; note = 2'-O-Methyl-uridine phosphorothioate
  modified_base 99: mod_base = OTHER; note = 2'-O-Methyl-uridine phosphorothioate
  modified_base 100: mod_base = OTHER; note = 2'-O-Methyl-uridine

SEQ ID NO: 2701 - RNA, 103 nt, synthetic construct; identical to SEQ ID NO: 1700
  source 1..103: mol_type = other RNA
  modified_base 1: mod_base = OTHER; note = 2'-O-Methyl-cytidine phosphorothioate
  modified_base 2: mod_base = OTHER; note = 2'-O-Methyl-adenosine phosphorothioate
  modified_base 3: mod_base = OTHER; note = 2'-O-Methyl-guanosine
  modified_base 21: mod_base = OTHER; note = 2'-O-Methyl-guanosine
  modified_base 28: mod_base = OTHER; note = 2'-O-Methyl-adenosine
  modified_base 29: mod_base = OTHER; note = 2'-O-Methyl-guanosine
  modified_base 30: mod_base = OTHER; note = 2'-O-Methyl-cytidine
  modified_base 31: mod_base = OTHER; note = 2'-O-Methyl-uridine
  modified_base 32: mod_base = OTHER; note = 2'-O-Methyl-adenosine
  modified_base 33: mod_base = OTHER; note = 2'-O-Methyl-guanosine
  modified_base 34: mod_base = OTHER; note = 2'-O-Methyl-adenosine
  modified_base 35: mod_base = OTHER; note = 2'-O-Methyl-adenosine
  modified_base 36: mod_base = OTHER; note = 2'-O-Methyl-adenosine
  modified_base 37: mod_base = OTHER; note = 2'-O-Methyl-uridine
  modified_base 38: mod_base = OTHER; note = 2'-O-Methyl-adenosine
  modified_base 39: mod_base = OTHER; note = 2'-O-Methyl-guanosine
  modified_base 40: mod_base = OTHER; note = 2'-O-Methyl-cytidine
  modified_base 41: mod_base = OTHER; note = 2'-O-Methyl-adenosine
  modified_base 42: mod_base = OTHER; note = 2'-O-Methyl-adenosine
  modified_base 45: mod_base = OTHER; note = uridine phosphorothioate
  modified_base 46: mod_base = OTHER; note = 2'-O-Methyl-adenosine
  modified_base 48: mod_base = OTHER; note = 2'-O-Methyl-adenosine
  modified_base 50: mod_base = OTHER; note = 2'-O-Methyl-uridine
  modified_base 52: mod_base = OTHER; note = 2'-O-Methyl-adenosine
  modified_base 53: mod_base = OTHER; note = 2'-O-Methyl-guanosine
  modified_base 54: mod_base = OTHER; note = 2'-O-Methyl-guanosine
  modified_base 55: mod_base = OTHER; note = 2'-O-Methyl-cytidine
  modified_base 56: mod_base = OTHER; note = 2'-O-Methyl-uridine
  modified_base 57: mod_base = OTHER; note = 2'-O-Methyl-adenosine
  modified_base 60: mod_base = OTHER; note = 2'-O-Methyl-cytidine
  modified_base 61: mod_base = OTHER; note = 2'-O-Methyl-cytidine
  modified_base 66: mod_base = OTHER; note = 2'-O-Methyl-uridine
  modified_base 67: mod_base = OTHER; note = 2'-O-Methyl-cytidine
  modified_base 70: mod_base = OTHER; note = 2'-O-Methyl-cytidine
  modified_base 71: mod_base = OTHER; note = 2'-O-Methyl-uridine
  modified_base 72: mod_base = OTHER; note = 2'-O-Methyl-uridine
  modified_base 74: mod_base = OTHER; note = 2'-O-Methyl-adenosine
  modified_base 75: mod_base = OTHER; note = 2'-O-Methyl-adenosine
  modified_base 76: mod_base = OTHER; note = 2'-O-Methyl-adenosine
  modified_base 77: mod_base = OTHER; note = 2'-O-Methyl-adenosine
  modified_base 78: mod_base = OTHER; note = 2'-O-Methyl-adenosine
  modified_base 79: mod_base = OTHER; note = 2'-O-Methyl-guanosine
  modified_base 80: mod_base = OTHER; note = 2'-O-Methyl-uridine
  modified_base 82: mod_base = OTHER; note = 2'-O-Methyl-guanosine
  modified_base 83: mod_base = OTHER; note = 2'-O-Methyl-cytidine
  modified_base 84: mod_base = OTHER; note = 2'-O-Methyl-adenosine
  modified_base 85: mod_base = OTHER; note = 2'-O-Methyl-cytidine
  modified_base 86: mod_base = OTHER; note = 2'-O-Methyl-cytidine
  modified_base 87: mod_base = OTHER; note = 2'-O-Methyl-guanosine
  modified_base 89: mod_base = OTHER; note = 2'-O-Methyl-guanosine
  modified_base 92: mod_base = OTHER; note = 2'-O-Methyl-guanosine
  modified_base 93: mod_base = OTHER; note = 2'-O-Methyl-guanosine
  modified_base 94: mod_base = OTHER; note = 2'-O-Methyl-uridine
  modified_base 95: mod_base = OTHER; note = 2'-O-Methyl-guanosine
  modified_base 96: mod_base = OTHER; note = 2'-O-Methyl-cytidine
  modified_base 97: mod_base = OTHER; note = 2'-O-Methyl-uridine
  modified_base 98: mod_base = OTHER; note = 2'-O-Methyl-uridine phosphorothioate
  modified_base 99: mod_base = OTHER; note = 2'-O-Methyl-uridine phosphorothioate
  modified_base 100: mod_base = OTHER; note = 2'-O-Methyl-uridine

SEQ ID NO: 2702 - RNA, 103 nt, synthetic construct; identical to SEQ ID NO: 1700
  source 1..103: mol_type = other RNA
  modified_base 1: mod_base = OTHER; note = 2'-O-Methyl-cytidine phosphorothioate
  modified_base 2: mod_base = OTHER; note = 2'-O-Methyl-adenosine phosphorothioate
  modified_base 3: mod_base = OTHER; note = 2'-O-Methyl-guanosine
  modified_base 21: mod_base = OTHER; note = 2'-O-Methyl-guanosine
  modified_base 28: mod_base = OTHER; note = 2'-O-Methyl-adenosine
  modified_base 29: mod_base = OTHER; note = 2'-O-Methyl-guanosine
  modified_base 30: mod_base = OTHER; note = 2'-O-Methyl-cytidine
  modified_base 31: mod_base = OTHER; note = 2'-O-Methyl-uridine
  modified_base 32: mod_base = OTHER; note = 2'-O-Methyl-adenosine
  modified_base 33: mod_base = OTHER; note = 2'-O-Methyl-guanosine
  modified_base 34: mod_base = OTHER; note = 2'-O-Methyl-adenosine
  modified_base 35: mod_base = OTHER; note = 2'-O-Methyl-adenosine
  modified_base 36: mod_base = OTHER; note = 2'-O-Methyl-adenosine
  modified_base 37: mod_base = OTHER; note = 2'-O-Methyl-uridine
  modified_base 38: mod_base = OTHER; note = 2'-O-Methyl-adenosine
  modified_base 39: mod_base = OTHER; note = 2'-O-Methyl-guanosine
  modified_base 40: mod_base = OTHER; note = 2'-O-Methyl-cytidine
  modified_base 41: mod_base = OTHER; note = 2'-O-Methyl-adenosine
  modified_base 42: mod_base = OTHER; note = 2'-O-Methyl-adenosine
  modified_base 45: mod_base = OTHER; note = uridine phosphorothioate
  modified_base 46: mod_base = OTHER; note = 2'-O-Methyl-adenosine
  modified_base 48: mod_base = OTHER; note = 2'-O-Methyl-adenosine
  modified_base 50: mod_base = OTHER; note = 2'-O-Methyl-uridine
  modified_base 52: mod_base = OTHER; note = 2'-O-Methyl-adenosine
  modified_base 53: mod_base = OTHER; note = 2'-O-Methyl-guanosine
  modified_base 54: mod_base = OTHER; note = 2'-O-Methyl-guanosine
  modified_base 57: mod_base = OTHER; note = 2'-O-Methyl-adenosine
  modified_base 61: mod_base = OTHER; note = 2'-O-Methyl-cytidine
  modified_base 66: mod_base = OTHER; note = 2'-O-Methyl-uridine
  modified_base 67: mod_base = OTHER; note = 2'-O-Methyl-cytidine
  modified_base 70: mod_base = OTHER; note = 2'-O-Methyl-cytidine
  modified_base 71: mod_base = OTHER; note = 2'-O-Methyl-uridine
  modified_base 72: mod_base = OTHER; note = 2'-O-Methyl-uridine
  modified_base 73: mod_base = OTHER; note = 2'-O-Methyl-guanosine
  modified_base 74: mod_base = OTHER; note = 2'-O-Methyl-adenosine
  modified_base 75: mod_base = OTHER; note = 2'-O-Methyl-adenosine
  modified_base 76: mod_base = OTHER; note = 2'-O-Methyl-adenosine
  modified_base 77: mod_base = OTHER; note = 2'-O-Methyl-adenosine
  modified_base 78: mod_base = OTHER; note = 2'-O-Methyl-adenosine
  modified_base 79: mod_base = OTHER; note = 2'-O-Methyl-guanosine
  modified_base 80: mod_base = OTHER; note = 2'-O-Methyl-uridine
  modified_base 82: mod_base = OTHER; note = 2'-O-Methyl-guanosine
  modified_base 83: mod_base = OTHER; note = 2'-O-Methyl-cytidine
  modified_base 84: mod_base = OTHER; note = 2'-O-Methyl-adenosine
  modified_base 85: mod_base = OTHER; note = 2'-O-Methyl-cytidine
  modified_base 86: mod_base = OTHER; note = 2'-O-Methyl-cytidine
  modified_base 87: mod_base = OTHER; note = 2'-O-Methyl-guanosine
  modified_base 89: mod_base = OTHER; note = 2'-O-Methyl-guanosine
  modified_base 91: mod_base = OTHER; note = 2'-O-Methyl-cytidine
  modified_base 92: mod_base = OTHER; note = 2'-O-Methyl-guanosine
  modified_base 93: mod_base = OTHER; note = 2'-O-Methyl-guanosine
  modified_base 94: mod_base = OTHER; note = 2'-O-Methyl-uridine
  modified_base 95: mod_base = OTHER; note = 2'-O-Methyl-guanosine
  modified_base 96: mod_base = OTHER; note = 2'-O-Methyl-cytidine
  modified_base 97: mod_base = OTHER; note = 2'-O-Methyl-uridine
  modified_base 98: mod_base = OTHER; note = 2'-O-Methyl-uridine phosphorothioate
  modified_base 99: mod_base = OTHER; note = 2'-O-Methyl-uridine phosphorothioate
  modified_base 100: mod_base = OTHER; note = 2'-O-Methyl-uridine

SEQ ID NO: 2703 - RNA, 103 nt, synthetic construct; identical to SEQ ID NO: 1700
  source 1..103: mol_type = other RNA
  modified_base 1: mod_base = OTHER; note = 2'-O-Methyl-cytidine phosphorothioate
  modified_base 2: mod_base = OTHER; note = 2'-O-Methyl-adenosine phosphorothioate
  modified_base 3: mod_base = OTHER; note = 2'-O-Methyl-guanosine
  modified_base 21: mod_base = OTHER; note = 2'-O-Methyl-guanosine
  modified_base 28: mod_base = OTHER; note = 2'-O-Methyl-adenosine
  modified_base 29: mod_base = OTHER; note = 2'-O-Methyl-guanosine
  modified_base 30: mod_base = OTHER; note = 2'-O-Methyl-cytidine
  modified_base 31: mod_base = OTHER; note = 2'-O-Methyl-uridine
  modified_base 32: mod_base = OTHER; note = 2'-O-Methyl-adenosine
  modified_base 34: mod_base = OTHER; note = 2'-O-Methyl-adenosine
  modified_base 35: mod_base = OTHER; note = 2'-O-Methyl-adenosine
  modified_base 36: mod_base = OTHER; note = 2'-O-Methyl-adenosine
  modified_base 37: mod_base = OTHER; note = 2'-O-Methyl-uridine
  modified_base 38: mod_base = OTHER; note = 2'-O-Methyl-adenosine
  modified_base 39: mod_base = OTHER; note = 2'-O-Methyl-guanosine
  modified_base 40: mod_base = OTHER; note = 2'-O-Methyl-cytidine
  modified_base 41: mod_base = OTHER; note = 2'-O-Methyl-adenosine
  modified_base 42: mod_base = OTHER; note = 2'-O-Methyl-adenosine
  modified_base 45: mod_base = OTHER; note = uridine phosphorothioate
  modified_base 46: mod_base = OTHER; note = 2'-O-Methyl-adenosine
  modified_base 48: mod_base = OTHER; note = 2'-O-Methyl-adenosine
  modified_base 50: mod_base = OTHER; note = 2'-O-Methyl-uridine
  modified_base 52: mod_base = OTHER; note = 2'-O-Methyl-adenosine
  modified_base 53: mod_base = OTHER; note = 2'-O-Methyl-guanosine
  modified_base 54: mod_base = OTHER; note = 2'-O-Methyl-guanosine
  modified_base 57: mod_base = OTHER; note = 2'-O-Methyl-adenosine
  modified_base 61: mod_base = OTHER; note = 2'-O-Methyl-cytidine
  modified_base 66: mod_base = OTHER; note = 2'-O-Methyl-uridine
  modified_base 67: mod_base = OTHER; note = 2'-O-Methyl-cytidine
  modified_base 70: mod_base = OTHER; note = 2'-O-Methyl-cytidine
  modified_base 71: mod_base = OTHER; note = 2'-O-Methyl-uridine
  modified_base 72: mod_base = OTHER; note = 2'-O-Methyl-uridine
  modified_base 73: mod_base = OTHER; note = 2'-O-Methyl-guanosine
  modified_base 74: mod_base = OTHER; note = 2'-O-Methyl-adenosine
  modified_base 75: mod_base = OTHER; note = 2'-O-Methyl-adenosine
  modified_base 76: mod_base = OTHER; note = 2'-O-Methyl-adenosine
  modified_base 77: mod_base = OTHER; note = 2'-O-Methyl-adenosine
  modified_base 78: mod_base = OTHER; note = 2'-O-Methyl-adenosine
  modified_base 79: mod_base = OTHER; note = 2'-O-Methyl-guanosine
  modified_base 80: mod_base = OTHER; note = 2'-O-Methyl-uridine
  modified_base 82: mod_base = OTHER; note = 2'-O-Methyl-guanosine
  modified_base 83: mod_base = OTHER; note = 2'-O-Methyl-cytidine
  modified_base 84: mod_base = OTHER; note = 2'-O-Methyl-adenosine
  modified_base 85: mod_base = OTHER; note = 2'-O-Methyl-cytidine
  modified_base 86: mod_base = OTHER; note = 2'-O-Methyl-cytidine
  modified_base 87: mod_base = OTHER; note = 2'-O-Methyl-guanosine
  modified_base 89: mod_base = OTHER; note = 2'-O-Methyl-guanosine
  modified_base 92: mod_base = OTHER; note = 2'-O-Methyl-guanosine
  modified_base 93: mod_base = OTHER; note = 2'-O-Methyl-guanosine
  modified_base 94: mod_base = OTHER; note = 2'-O-Methyl-uridine
  modified_base 95: mod_base = OTHER; note = 2'-O-Methyl-guanosine
  modified_base 96: mod_base = OTHER; note = 2'-O-Methyl-cytidine
  modified_base 97: mod_base = OTHER; note = 2'-O-Methyl-uridine
  modified_base 98: mod_base = OTHER; note = 2'-O-Methyl-uridine phosphorothioate
  modified_base 99: mod_base = OTHER; note = 2'-O-Methyl-uridine phosphorothioate
  modified_base 100: mod_base = OTHER; note = 2'-O-Methyl-uridine

SEQ ID NO: 2704 - RNA, 103 nt, synthetic construct; identical to SEQ ID NO: 1700
  source 1..103: mol_type = other RNA
  modified_base 1: mod_base = OTHER; note = 2'-O-Methyl-cytidine phosphorothioate
  modified_base 2: mod_base = OTHER; note = 2'-O-Methyl-adenosine phosphorothioate
  modified_base 3: mod_base = OTHER; note = 2'-O-Methyl-guanosine
  modified_base 21: mod_base = OTHER; note = 2'-O-Methyl-guanosine
  modified_base 28: mod_base = OTHER; note = 2'-O-Methyl-adenosine
  modified_base 29: mod_base = OTHER; note = 2'-O-Methyl-guanosine
  modified_base 30: mod_base = OTHER; note = 2'-O-Methyl-cytidine
  modified_base 31: mod_base = OTHER; note = 2'-O-Methyl-uridine
  modified_base 32: mod_base = OTHER; note = 2'-O-Methyl-adenosine
  modified_base 34: mod_base = OTHER; note = 2'-O-Methyl-adenosine
  modified_base 35: mod_base = OTHER; note = 2'-O-Methyl-adenosine
  modified_base 36: mod_base = OTHER; note = 2'-O-Methyl-adenosine
  modified_base 37: mod_base = OTHER; note = 2'-O-Methyl-uridine
  modified_base 38: mod_base = OTHER; note = 2'-O-Methyl-adenosine
  modified_base 39: mod_base = OTHER; note = 2'-O-Methyl-guanosine
  modified_base 40: mod_base = OTHER; note = 2'-O-Methyl-cytidine
  modified_base 41: mod_base = OTHER; note = 2'-O-Methyl-adenosine
  modified_base 42: mod_base = OTHER; note = 2'-O-Methyl-adenosine
  modified_base 45: mod_base = OTHER; note = uridine phosphorothioate
  modified_base 46: mod_base = OTHER; note = 2'-O-Methyl-adenosine
  modified_base 48: mod_base = OTHER; note = 2'-O-Methyl-adenosine
  modified_base 50: mod_base = OTHER; note = 2'-O-Methyl-uridine
  modified_base 52: mod_base = OTHER; note = 2'-O-Methyl-adenosine
  modified_base 53: mod_base = OTHER; note = 2'-O-Methyl-guanosine
  modified_base 54: mod_base = OTHER; note = 2'-O-Methyl-guanosine
  modified_base 57: mod_base = OTHER; note = 2'-O-Methyl-adenosine
  modified_base 61: mod_base = OTHER; note = 2'-O-Methyl-cytidine
  modified_base 66: mod_base = OTHER; note = 2'-O-Methyl-uridine
  modified_base 67: mod_base = OTHER; note = 2'-O-Methyl-cytidine
  modified_base 70: mod_base = OTHER; note = 2'-O-Methyl-cytidine
  modified_base 71: mod_base = OTHER; note = 2'-O-Methyl-uridine
  modified_base 72: mod_base = OTHER; note = 2'-O-Methyl-uridine
  modified_base 73: mod_base = OTHER; note = 2'-O-Methyl-guanosine
  modified_base 74: mod_base = OTHER; note = 2'-O-Methyl-adenosine
  modified_base 75: mod_base = OTHER; note = 2'-O-Methyl-adenosine
  modified_base 76: mod_base = OTHER; note = 2'-O-Methyl-adenosine
  modified_base 77: mod_base = OTHER; note = 2'-O-Methyl-adenosine
  modified_base 78: mod_base = OTHER; note = 2'-O-Methyl-adenosine
  modified_base 79: mod_base = OTHER; note = 2'-O-Methyl-guanosine
  modified_base 80: mod_base = OTHER; note = 2'-O-Methyl-uridine
  modified_base 82: mod_base = OTHER; note = 2'-O-Methyl-guanosine
  modified_base 83: mod_base = OTHER; note = 2'-O-Methyl-cytidine
  modified_base 84: mod_base = OTHER; note = 2'-O-Methyl-adenosine
  modified_base 85: mod_base = OTHER; note = 2'-O-Methyl-cytidine
  modified_base 86: mod_base = OTHER; note = 2'-O-Methyl-cytidine
  modified_base 87: mod_base = OTHER; note = 2'-O-Methyl-guanosine
  modified_base 89: mod_base = OTHER; note = 2'-O-Methyl-guanosine
  modified_base 91: mod_base = OTHER; note = 2'-O-Methyl-cytidine
  modified_base 92: mod_base = OTHER; note = 2'-O-Methyl-guanosine
  modified_base 93: mod_base = OTHER; note = 2'-O-Methyl-guanosine
  modified_base 94: mod_base = OTHER; note = 2'-O-Methyl-uridine
  modified_base 95: mod_base = OTHER; note = 2'-O-Methyl-guanosine
  modified_base 96: mod_base = OTHER; note = 2'-O-Methyl-cytidine
  modified_base 97: mod_base = OTHER; note = 2'-O-Methyl-uridine
  modified_base 98: mod_base = OTHER; note = 2'-O-Methyl-uridine phosphorothioate
  modified_base 99: mod_base = OTHER; note = 2'-O-Methyl-uridine phosphorothioate
  modified_base 100: mod_base = OTHER; note = 2'-O-Methyl-uridine

SEQ ID NO: 2705 - RNA, 103 nt, synthetic construct; identical to SEQ ID NO: 1700
  source 1..103: mol_type = other RNA
  modified_base 1: mod_base = OTHER; note = 2'-O-Methyl-cytidine phosphorothioate
  modified_base 2: mod_base = OTHER; note = 2'-O-Methyl-adenosine phosphorothioate
  modified_base 3: mod_base = OTHER; note = 2'-O-Methyl-guanosine
  modified_base 21: mod_base = OTHER; note = 2'-O-Methyl-guanosine
  modified_base 28: mod_base = OTHER; note = 2'-O-Methyl-adenosine
  modified_base 29: mod_base = OTHER; note = 2'-O-Methyl-guanosine
  modified_base 30: mod_base = OTHER; note = 2'-O-Methyl-cytidine
  modified_base 31: mod_base = OTHER; note = 2'-O-Methyl-uridine
  modified_base 32: mod_base = OTHER; note = 2'-O-Methyl-adenosine
  modified_base 34: mod_base = OTHER; note = 2'-O-Methyl-adenosine
  modified_base 35: mod_base = OTHER; note = 2'-O-Methyl-adenosine
  modified_base 36: mod_base = OTHER; note = 2'-O-Methyl-adenosine
  modified_base 37: mod_base = OTHER; note = 2'-O-Methyl-uridine
  modified_base 38: mod_base = OTHER; note = 2'-O-Methyl-adenosine
  modified_base 39: mod_base = OTHER; note = 2'-O-Methyl-guanosine
  modified_base 40: mod_base = OTHER; note = 2'-O-Methyl-cytidine
  modified_base 41: mod_base = OTHER; note = 2'-O-Methyl-adenosine
  modified_base 42: mod_base = OTHER; note = 2'-O-Methyl-adenosine
  modified_base 45: mod_base = OTHER; note = uridine phosphorothioate
  modified_base 46: mod_base = OTHER; note = 2'-O-Methyl-adenosine
  modified_base 48: mod_base = OTHER; note = 2'-O-Methyl-adenosine
  modified_base 50: mod_base = OTHER; note = 2'-O-Methyl-uridine
  modified_base 52: mod_base = OTHER; note = 2'-O-Methyl-adenosine
  modified_base 53: mod_base = OTHER; note = 2'-O-Methyl-guanosine
  modified_base 54: mod_base = OTHER; note = 2'-O-Methyl-guanosine
  modified_base 55: mod_base = OTHER; note = 2'-O-Methyl-cytidine
  modified_base 56: mod_base = OTHER; note = 2'-O-Methyl-uridine
  modified_base 57: mod_base = OTHER; note = 2'-O-Methyl-adenosine
  modified_base 60: mod_base = OTHER; note = 2'-O-Methyl-cytidine
  modified_base 61: mod_base = OTHER; note = 2'-O-Methyl-cytidine
  modified_base 66: mod_base = OTHER; note = 2'-O-Methyl-uridine
  modified_base 67: mod_base = OTHER; note = 2'-O-Methyl-cytidine
  modified_base 70: mod_base = OTHER; note = 2'-O-Methyl-cytidine
  modified_base 71: mod_base = OTHER; note = 2'-O-Methyl-uridine
  modified_base 72: mod_base = OTHER; note = 2'-O-Methyl-uridine
  modified_base 74: mod_base = OTHER; note = 2'-O-Methyl-adenosine
  modified_base 75: mod_base = OTHER; note = 2'-O-Methyl-adenosine
  modified_base 76: mod_base = OTHER; note = 2'-O-Methyl-adenosine
  modified_base 77: mod_base = OTHER; note = 2'-O-Methyl-adenosine
  modified_base 78: mod_base = OTHER; note = 2'-O-Methyl-adenosine
  modified_base 79: mod_base = OTHER; note = 2'-O-Methyl-guanosine
  modified_base 80: mod_base = OTHER; note = 2'-O-Methyl-uridine
  modified_base 82: mod_base = OTHER; note = 2'-O-Methyl-guanosine
  modified_base 83: mod_base = OTHER; note = 2'-O-Methyl-cytidine
  modified_base 84: mod_base = OTHER; note = 2'-O-Methyl-adenosine
  modified_base 85: mod_base = OTHER; note = 2'-O-Methyl-cytidine
  modified_base 86: mod_base = OTHER; note = 2'-O-Methyl-cytidine
  modified_base 87: mod_base = OTHER; note = 2'-O-Methyl-guanosine
  modified_base 89: mod_base = OTHER; note = 2'-O-Methyl-guanosine
  modified_base 92: mod_base = OTHER; note = 2'-O-Methyl-guanosine
  modified_base 93: mod_base = OTHER; note = 2'-O-Methyl-guanosine
  modified_base 94: mod_base = OTHER; note = 2'-O-Methyl-uridine
  modified_base 95: mod_base = OTHER; note = 2'-O-Methyl-guanosine
  modified_base 96: mod_base = OTHER; note = 2'-O-Methyl-cytidine
  modified_base 97: mod_base = OTHER; note = 2'-O-Methyl-uridine
  modified_base 98: mod_base = OTHER; note = 2'-O-Methyl-uridine phosphorothioate
  modified_base 99: mod_base = OTHER; note = 2'-O-Methyl-uridine phosphorothioate
  modified_base 100: mod_base = OTHER; note = 2'-O-Methyl-uridine

SEQ ID NO: 2706 - RNA, 103 nt, synthetic construct; identical to SEQ ID NO: 1643
  source 1..103: mol_type = other RNA
  modified_base 1: mod_base = OTHER; note = 2'-O-Methyl-cytidine phosphorothioate
  modified_base 2: mod_base = OTHER; note = 2'-O-Methyl-cytidine phosphorothioate
  modified_base 3: mod_base = OTHER; note = 2'-O-Methyl-cytidine
  modified_base 21: mod_base = OTHER; note = 2'-O-Methyl-guanosine
  modified_base 25: mod_base = OTHER; note = uridine phosphorothioate
  modified_base 28: mod_base = OTHER; note = 2'-O-Methyl-adenosine
  modified_base 29: mod_base = OTHER; note = 2'-O-Methyl-guanosine
  modified_base 30: mod_base = OTHER; note = 2'-O-Methyl-cytidine
  modified_base 31: mod_base = OTHER; note = 2'-O-Methyl-uridine
  modified_base 32: mod_base = OTHER; note = 2'-O-Methyl-adenosine
  modified_base 33: mod_base = OTHER; note = 2'-O-Methyl-guanosine
  modified_base 34: mod_base = OTHER; note = 2'-O-Methyl-adenosine
  modified_base 35: mod_base = OTHER; note = 2'-O-Methyl-adenosine
  modified_base 36: mod_base = OTHER; note = 2'-O-Methyl-adenosine
  modified_base 37: mod_base = OTHER; note = 2'-O-Methyl-uridine
  modified_base 38: mod_base = OTHER; note = 2'-O-Methyl-adenosine
  modified_base 39: mod_base = OTHER; note = 2'-O-Methyl-guanosine
  modified_base 40: mod_base = OTHER; note = 2'-O-Methyl-cytidine
  modified_base 41: mod_base = OTHER; note = 2'-O-Methyl-adenosine
  modified_base 42: mod_base = OTHER; note = 2'-O-Methyl-adenosine
  modified_base 46: mod_base = OTHER; note = 2'-O-Methyl-adenosine
  modified_base 48: mod_base = OTHER; note = 2'-O-Methyl-adenosine
  modified_base 50: mod_base = OTHER; note = 2'-O-Methyl-uridine
  modified_base 52: mod_base = OTHER; note = 2'-O-Methyl-adenosine
  modified_base 53: mod_base = OTHER; note = 2'-O-Methyl-guanosine
  modified_base 54: mod_base = OTHER; note = 2'-O-Methyl-guanosine
  modified_base 55: mod_base = OTHER; note = 2'-O-Methyl-cytidine
  modified_base 56: mod_base = OTHER; note = 2'-O-Methyl-uridine
  modified_base 57: mod_base = OTHER; note = 2'-O-Methyl-adenosine
  modified_base 60: mod_base = OTHER; note = 2'-O-Methyl-cytidine
  modified_base 61: mod_base = OTHER; note = 2'-O-Methyl-cytidine
  modified_base 66: mod_base = OTHER; note = 2'-O-Methyl-uridine
  modified_base 67: mod_base = OTHER; note = 2'-O-Methyl-cytidine
  modified_base 70: mod_base = OTHER; note = 2'-O-Methyl-cytidine
  modified_base 71: mod_base = OTHER; note = 2'-O-Methyl-uridine
  modified_base 72: mod_base = OTHER; note = 2'-O-Methyl-uridine
  modified_base 73: mod_base = OTHER; note = 2'-O-Methyl-guanosine
  modified_base 74: mod_base = OTHER; note = 2'-O-Methyl-adenosine
  modified_base 75: mod_base = OTHER; note = 2'-O-Methyl-adenosine
  modified_base 76: mod_base = OTHER; note = 2'-O-Methyl-adenosine
  modified_base 77: mod_base = OTHER; note = 2'-O-Methyl-adenosine
  modified_base 78: mod_base = OTHER; note = 2'-O-Methyl-adenosine
  modified_base 79: mod_base = OTHER; note = 2'-O-Methyl-guanosine
  modified_base 80: mod_base = OTHER; note = 2'-O-Methyl-uridine
  modified_base 81: mod_base = OTHER; note = 2'-O-Methyl-guanosine
  modified_base 83: mod_base = OTHER; note = 2'-O-Methyl-cytidine
  modified_base 84: mod_base = OTHER; note = 2'-O-Methyl-adenosine
  modified_base 85: mod_base = OTHER; note = 2'-O-Methyl-cytidine
  modified_base 86: mod_base = OTHER; note = 2'-O-Methyl-cytidine
  modified_base 87: mod_base = OTHER; note = 2'-O-Methyl-guanosine
  modified_base 88: mod_base = OTHER; note = 2'-O-Methyl-adenosine
  modified_base 89: mod_base = OTHER; note = 2'-O-Methyl-guanosine
  modified_base 90: mod_base = OTHER; note = 2'-O-Methyl-uridine
  modified_base 91: mod_base = OTHER; note = 2'-O-Methyl-cytidine
  modified_base 92: mod_base = OTHER; note = 2'-O-Methyl-guanosine
  modified_base 93: mod_base = OTHER; note = 2'-O-Methyl-guanosine
  modified_base 94: mod_base = OTHER; note = 2'-O-Methyl-uridine
  modified_base 95: mod_base = OTHER; note = 2'-O-Methyl-guanosine
  modified_base 96: mod_base = OTHER; note = 2'-O-Methyl-cytidine
  modified_base 97: mod_base = OTHER; note = 2'-O-Methyl-uridine
  modified_base 98: mod_base = OTHER; note = 2'-O-Methyl-uridine phosphorothioate
  modified_base 99: mod_base = OTHER; note = 2'-O-Methyl-uridine phosphorothioate
  modified_base 100: mod_base = OTHER; note = 2'-O-Methyl-uridine

SEQ ID NO: 2707 - RNA, 103 nt, synthetic construct; identical to SEQ ID NO: 1643
  source 1..103: mol_type = other RNA
  modified_base 1: mod_base = OTHER; note = 2'-O-Methyl-cytidine phosphorothioate
  modified_base 2: mod_base = OTHER; note = 2'-O-Methyl-cytidine phosphorothioate
  modified_base 3: mod_base = OTHER; note = 2'-O-Methyl-cytidine
  modified_base 21: mod_base = OTHER; note = 2'-O-Methyl-guanosine
  modified_base 25: mod_base = OTHER; note = uridine phosphorothioate
  modified_base 28: mod_base = OTHER; note = 2'-O-Methyl-adenosine
  modified_base 29: mod_base = OTHER; note = 2'-O-Methyl-guanosine
  modified_base 30: mod_base = OTHER; note = 2'-O-Methyl-cytidine
  modified_base 31: mod_base = OTHER; note = 2'-O-Methyl-uridine
  modified_base 32: mod_base = OTHER; note = 2'-O-Methyl-adenosine
  modified_base 34: mod_base = OTHER; note = 2'-O-Methyl-adenosine
  modified_base 35: mod_base = OTHER; note = 2'-O-Methyl-adenosine
  modified_base 36: mod_base = OTHER; note = 2'-O-Methyl-adenosine
  modified_base 37: mod_base = OTHER; note = 2'-O-Methyl-uridine
  modified_base 38: mod_base = OTHER; note = 2'-O-Methyl-adenosine
  modified_base 39: mod_base = OTHER; note = 2'-O-Methyl-guanosine
  modified_base 40: mod_base = OTHER; note = 2'-O-Methyl-cytidine
  modified_base 41: mod_base = OTHER; note = 2'-O-Methyl-adenosine
  modified_base 42: mod_base = OTHER; note = 2'-O-Methyl-adenosine
  modified_base 46: mod_base = OTHER; note = 2'-O-Methyl-adenosine
  modified_base 48: mod_base = OTHER; note = 2'-O-Methyl-adenosine
  modified_base 50: mod_base = OTHER; note = 2'-O-Methyl-uridine
  modified_base 52: mod_base = OTHER; note = 2'-O-Methyl-adenosine
  modified_base 53: mod_base = OTHER; note = 2'-O-Methyl-guanosine
  modified_base 54: mod_base = OTHER; note = 2'-O-Methyl-guanosine
  modified_base 55: mod_base = OTHER; note = 2'-O-Methyl-cytidine
  modified_base 56: mod_base = OTHER; note = 2'-O-Methyl-uridine
  modified_base 57: mod_base = OTHER; note = 2'-O-Methyl-adenosine
  modified_base 60: mod_base = OTHER; note = 2'-O-Methyl-cytidine
  modified_base 61: mod_base = OTHER; note = 2'-O-Methyl-cytidine
  modified_base 66: mod_base = OTHER; note = 2'-O-Methyl-uridine
  modified_base 67: mod_base = OTHER; note = 2'-O-Methyl-cytidine
  modified_base 70: mod_base = OTHER; note = 2'-O-Methyl-cytidine
  modified_base 71: mod_base = OTHER; note = 2'-O-Methyl-uridine
  modified_base 72: mod_base = OTHER; note = 2'-O-Methyl-uridine
  modified_base 74: mod_base = OTHER; note = 2'-O-Methyl-adenosine
  modified_base 75: mod_base = OTHER; note = 2'-O-Methyl-adenosine
  modified_base 76: mod_base = OTHER; note = 2'-O-Methyl-adenosine
  modified_base 77: mod_base = OTHER; note = 2'-O-Methyl-adenosine
  modified_base 78: mod_base = OTHER; note = 2'-O-Methyl-adenosine
  modified_base 79: mod_base = OTHER; note = 2'-O-Methyl-guanosine
  modified_base 80: mod_base = OTHER; note = 2'-O-Methyl-uridine
  modified_base 81: mod_base = OTHER; note = 2'-O-Methyl-guanosine
  modified_base 83: mod_base = OTHER; note = 2'-O-Methyl-cytidine
  modified_base 84: mod_base = OTHER; note = 2'-O-Methyl-adenosine
  modified_base 85: mod_base = OTHER; note = 2'-O-Methyl-cytidine
  modified_base 86: mod_base = OTHER; note = 2'-O-Methyl-cytidine
  modified_base 87: mod_base = OTHER; note = 2'-O-Methyl-guanosine
  modified_base 88: mod_base = OTHER; note = 2'-O-Methyl-adenosine
  modified_base 89: mod_base = OTHER; note = 2'-O-Methyl-guanosine
  modified_base 90: mod_base = OTHER; note = 2'-O-Methyl-uridine
  modified_base 91: mod_base = OTHER; note = 2'-O-Methyl-cytidine
  modified_base 92: mod_base = OTHER; note = 2'-O-Methyl-guanosine
  modified_base 93: mod_base = OTHER; note = 2'-O-Methyl-guanosine
  modified_base 94: mod_base = OTHER; note = 2'-O-Methyl-uridine
  modified_base 95: mod_base = OTHER; note = 2'-O-Methyl-guanosine
  modified_base 96: mod_base = OTHER; note = 2'-O-Methyl-cytidine
  modified_base 97: mod_base = OTHER; note = 2'-O-Methyl-uridine
  modified_base 98: mod_base = OTHER; note = 2'-O-Methyl-uridine phosphorothioate
  modified_base 99: mod_base = OTHER; note = 2'-O-Methyl-uridine phosphorothioate
  modified_base 100: mod_base = OTHER; note = 2'-O-Methyl-uridine

SEQ ID NO: 2708 - RNA, 103 nt, synthetic construct; identical to SEQ ID NO: 1699
  source 1..103: mol_type = other RNA
  modified_base 1: mod_base = OTHER; note = 2'-O-Methyl-guanosine phosphorothioate
  modified_base 2: mod_base = OTHER; note = 2'-O-Methyl-adenosine phosphorothioate
  modified_base 3: mod_base = OTHER; note = 2'-O-Methyl-guanosine
  modified_base 21: mod_base = OTHER; note = 2'-O-Methyl-guanosine
  modified_base 25: mod_base = OTHER; note = uridine phosphorothioate
  modified_base 28: mod_base = OTHER; note = 2'-O-Methyl-adenosine
  modified_base 29: mod_base = OTHER; note = 2'-O-Methyl-guanosine
  modified_base 30: mod_base = OTHER; note = 2'-O-Methyl-cytidine
  modified_base 31: mod_base = OTHER; note = 2'-O-Methyl-uridine
  modified_base 32: mod_base = OTHER; note = 2'-O-Methyl-adenosine
  modified_base 33: mod_base = OTHER; note = 2'-O-Methyl-guanosine
  modified_base 34: mod_base = OTHER; note = 2'-O-Methyl-adenosine
  modified_base 35: mod_base = OTHER; note = 2'-O-Methyl-adenosine
  modified_base 36: mod_base = OTHER; note = 2'-O-Methyl-adenosine
  modified_base 37: mod_base = OTHER; note = 2'-O-Methyl-uridine
  modified_base 38: mod_base = OTHER; note = 2'-O-Methyl-adenosine
  modified_base 39: mod_base = OTHER; note = 2'-O-Methyl-guanosine
  modified_base 40: mod_base = OTHER; note = 2'-O-Methyl-cytidine
  modified_base 41: mod_base = OTHER; note = 2'-O-Methyl-adenosine
  modified_base 42: mod_base = OTHER; note = 2'-O-Methyl-adenosine
  modified_base 46: mod_base = OTHER; note = 2'-O-Methyl-adenosine
  modified_base 48: mod_base = OTHER; note = 2'-O-Methyl-adenosine
  modified_base 50: mod_base = OTHER; note = 2'-O-Methyl-uridine
  modified_base 52: mod_base = OTHER; note = 2'-O-Methyl-adenosine
  modified_base 53: mod_base = OTHER; note = 2'-O-Methyl-guanosine
  modified_base 54: mod_base = OTHER; note = 2'-O-Methyl-guanosine
  modified_base 55: mod_base = OTHER; note = 2'-O-Methyl-cytidine
  modified_base 56: mod_base = OTHER; note = 2'-O-Methyl-uridine
  modified_base 57: mod_base = OTHER; note = 2'-O-Methyl-adenosine
  modified_base 60: mod_base = OTHER; note = 2'-O-Methyl-cytidine
  modified_base 61: mod_base = OTHER; note = 2'-O-Methyl-cytidine
  modified_base 66: mod_base = OTHER; note = 2'-O-Methyl-uridine
  modified_base 67: mod_base = OTHER; note = 2'-O-Methyl-cytidine
  modified_base 70: mod_base = OTHER; note = 2'-O-Methyl-cytidine
  modified_base 71: mod_base = OTHER; note = 2'-O-Methyl-uridine
  modified_base 72: mod_base = OTHER; note = 2'-O-Methyl-uridine
  modified_base 73: mod_base = OTHER; note = 2'-O-Methyl-guanosine
  modified_base 74: mod_base = OTHER; note = 2'-O-Methyl-adenosine
  modified_base 75: mod_base = OTHER; note = 2'-O-Methyl-adenosine
  modified_base 76: mod_base = OTHER; note = 2'-O-Methyl-adenosine
  modified_base 77: mod_base = OTHER; note = 2'-O-Methyl-adenosine
  modified_base 78: mod_base = OTHER; note = 2'-O-Methyl-adenosine
  modified_base 79: mod_base = OTHER; note = 2'-O-Methyl-guanosine
  modified_base 80: mod_base = OTHER; note = 2'-O-Methyl-uridine
  modified_base 81: mod_base = OTHER; note = 2'-O-Methyl-guanosine
  modified_base 83: mod_base = OTHER; note = 2'-O-Methyl-cytidine
  modified_base 84: mod_base = OTHER; note = 2'-O-Methyl-adenosine
  modified_base 85: mod_base = OTHER; note = 2'-O-Methyl-cytidine
  modified_base 86: mod_base = OTHER; note = 2'-O-Methyl-cytidine
  modified_base 87: mod_base = OTHER; note = 2'-O-Methyl-guanosine
  modified_base 88: mod_base = OTHER; note = 2'-O-Methyl-adenosine
  modified_base 89: mod_base = OTHER; note = 2'-O-Methyl-guanosine
  modified_base 90: mod_base = OTHER; note = 2'-O-Methyl-uridine
  modified_base 91: mod_base = OTHER; note = 2'-O-Methyl-cytidine
  modified_base 92: mod_base = OTHER; note = 2'-O-Methyl-guanosine
  modified_base 93: mod_base = OTHER; note = 2'-O-Methyl-guanosine
  modified_base 94: mod_base = OTHER; note = 2'-O-Methyl-uridine
  modified_base 95: mod_base = OTHER; note = 2'-O-Methyl-guanosine
  modified_base 96: mod_base = OTHER; note = 2'-O-Methyl-cytidine
  modified_base 97: mod_base = OTHER; note = 2'-O-Methyl-uridine
  modified_base 98: mod_base = OTHER; note = 2'-O-Methyl-uridine phosphorothioate
  modified_base 99: mod_base = OTHER; note = 2'-O-Methyl-uridine phosphorothioate
  modified_base 100: mod_base = OTHER; note = 2'-O-Methyl-uridine

SEQ ID NO: 2709 - RNA, 103 nt, synthetic construct; identical to SEQ ID NO: 1699
  source 1..103: mol_type = other RNA
  modified_base 1: mod_base = OTHER; note = 2'-O-Methyl-guanosine phosphorothioate
  modified_base 2: mod_base = OTHER; note = 2'-O-Methyl-adenosine phosphorothioate
  modified_base 3: mod_base = OTHER; note = 2'-O-Methyl-guanosine
  modified_base 21: mod_base = OTHER; note = 2'-O-Methyl-guanosine
  modified_base 25: mod_base = OTHER; note = uridine phosphorothioate
  modified_base 28: mod_base = OTHER; note = 2'-O-Methyl-adenosine
  modified_base 29: mod_base = OTHER; note = 2'-O-Methyl-guanosine
  modified_base 30: mod_base = OTHER; note = 2'-O-Methyl-cytidine
  modified_base 31: mod_base = OTHER; note = 2'-O-Methyl-uridine
  modified_base 32: mod_base = OTHER; note = 2'-O-Methyl-adenosine
  modified_base 34: mod_base = OTHER; note = 2'-O-Methyl-adenosine
  modified_base 35: mod_base = OTHER; note = 2'-O-Methyl-adenosine
  modified_base 36: mod_base = OTHER; note = 2'-O-Methyl-adenosine
  modified_base 37: mod_base = OTHER; note = 2'-O-Methyl-uridine
  modified_base 38: mod_base = OTHER; note = 2'-O-Methyl-adenosine
  modified_base 39: mod_base = OTHER; note = 2'-O-Methyl-guanosine
  modified_base 40: mod_base = OTHER; note = 2'-O-Methyl-cytidine
  modified_base 41: mod_base = OTHER; note = 2'-O-Methyl-adenosine
  modified_base 42: mod_base = OTHER; note = 2'-O-Methyl-adenosine
  modified_base 46: mod_base = OTHER; note = 2'-O-Methyl-adenosine
  modified_base 48: mod_base = OTHER; note = 2'-O-Methyl-adenosine
  modified_base 50: mod_base = OTHER; note = 2'-O-Methyl-uridine
  modified_base 52: mod_base = OTHER; note = 2'-O-Methyl-adenosine
  modified_base 53: mod_base = OTHER; note = 2'-O-Methyl-guanosine
  modified_base 54: mod_base = OTHER; note = 2'-O-Methyl-guanosine
  modified_base 55: mod_base = OTHER; note = 2'-O-Methyl-cytidine
  modified_base 56: mod_base = OTHER; note = 2'-O-Methyl-uridine
  modified_base 57: mod_base = OTHER; note = 2'-O-Methyl-adenosine
  modified_base 60: mod_base = OTHER; note = 2'-O-Methyl-cytidine
  modified_base 61: mod_base = OTHER; note = 2'-O-Methyl-cytidine
  modified_base 66: mod_base = OTHER; note = 2'-O-Methyl-uridine
  modified_base 67: mod_base = OTHER; note = 2'-O-Methyl-cytidine
  modified_base 70: mod_base = OTHER; note = 2'-O-Methyl-cytidine
  modified_base 71: mod_base = OTHER; note = 2'-O-Methyl-uridine
  modified_base 72: mod_base = OTHER; note = 2'-O-Methyl-uridine
  modified_base 74: mod_base = OTHER; note = 2'-O-Methyl-adenosine
  modified_base 75: mod_base = OTHER; note = 2'-O-Methyl-adenosine
  modified_base 76: mod_base = OTHER; note = 2'-O-Methyl-adenosine
  modified_base 77: mod_base = OTHER; note = 2'-O-Methyl-adenosine
  modified_base 78: mod_base = OTHER; note = 2'-O-Methyl-adenosine
  modified_base 79: mod_base = OTHER; note = 2'-O-Methyl-guanosine
  modified_base 80: mod_base = OTHER; note = 2'-O-Methyl-uridine
  modified_base 81: mod_base = OTHER; note = 2'-O-Methyl-guanosine
  modified_base 83: mod_base = OTHER; note = 2'-O-Methyl-cytidine
  modified_base 84: mod_base = OTHER; note = 2'-O-Methyl-adenosine
  modified_base 85: mod_base = OTHER; note = 2'-O-Methyl-cytidine
  modified_base 86: mod_base = OTHER; note = 2'-O-Methyl-cytidine
  modified_base 87: mod_base = OTHER; note = 2'-O-Methyl-guanosine
  modified_base 88: mod_base = OTHER; note = 2'-O-Methyl-adenosine
  modified_base 89: mod_base = OTHER; note = 2'-O-Methyl-guanosine
  modified_base 90: mod_base = OTHER; note = 2'-O-Methyl-uridine
  modified_base 91: mod_base = OTHER; note = 2'-O-Methyl-cytidine
  modified_base 92: mod_base = OTHER; note = 2'-O-Methyl-guanosine
  modified_base 93: mod_base = OTHER; note = 2'-O-Methyl-guanosine
  modified_base 94: mod_base = OTHER; note = 2'-O-Methyl-uridine
  modified_base 95: mod_base = OTHER; note = 2'-O-Methyl-guanosine
  modified_base 96: mod_base = OTHER; note = 2'-O-Methyl-cytidine
  modified_base 97: mod_base = OTHER; note = 2'-O-Methyl-uridine
  modified_base 98: mod_base = OTHER; note = 2'-O-Methyl-uridine phosphorothioate
  modified_base 99: mod_base = OTHER; note = 2'-O-Methyl-uridine phosphorothioate
  modified_base 100: mod_base = OTHER; note = 2'-O-Methyl-uridine

SEQ ID NO: 2710 - RNA, 103 nt, synthetic construct; identical to SEQ ID NO: 1700
  source 1..103: mol_type = other RNA
  modified_base 1: mod_base = OTHER; note = 2'-O-Methyl-cytidine phosphorothioate
  modified_base 2: mod_base = OTHER; note = 2'-O-Methyl-adenosine phosphorothioate
  modified_base 3: mod_base = OTHER; note = 2'-O-Methyl-guanosine
  modified_base 21: mod_base = OTHER; note = 2'-O-Methyl-guanosine
  modified_base 25: mod_base = OTHER; note = uridine phosphorothioate
  modified_base 28: mod_base = OTHER; note = 2'-O-Methyl-adenosine
  modified_base 29: mod_base = OTHER; note = 2'-O-Methyl-guanosine
  modified_base 30: mod_base = OTHER; note = 2'-O-Methyl-cytidine
  modified_base 31: mod_base = OTHER; note = 2'-O-Methyl-uridine
  modified_base 32: mod_base = OTHER; note = 2'-O-Methyl-adenosine
  modified_base 33: mod_base = OTHER; note = 2'-O-Methyl-guanosine
  modified_base 34: mod_base = OTHER; note = 2'-O-Methyl-adenosine
  modified_base 35: mod_base = OTHER; note = 2'-O-Methyl-adenosine
  modified_base 36: mod_base = OTHER; note = 2'-O-Methyl-adenosine
  modified_base 37: mod_base = OTHER; note = 2'-O-Methyl-uridine
  modified_base 38: mod_base = OTHER; note = 2'-O-Methyl-adenosine
  modified_base 39: mod_base = OTHER; note = 2'-O-Methyl-guanosine
  modified_base 40: mod_base = OTHER; note = 2'-O-Methyl-cytidine
  modified_base 41: mod_base = OTHER; note = 2'-O-Methyl-adenosine
  modified_base 42: mod_base = OTHER; note = 2'-O-Methyl-adenosine
  modified_base 46: mod_base = OTHER; note = 2'-O-Methyl-adenosine
  modified_base 48: mod_base = OTHER; note = 2'-O-Methyl-adenosine
  modified_base 50: mod_base = OTHER; note = 2'-O-Methyl-uridine
  modified_base 52: mod_base = OTHER; note = 2'-O-Methyl-adenosine
  modified_base 53: mod_base = OTHER; note = 2'-O-Methyl-guanosine
  modified_base 54: mod_base = OTHER; note = 2'-O-Methyl-guanosine
  modified_base 57: mod_base = OTHER; note = 2'-O-Methyl-adenosine
  modified_base 61: mod_base = OTHER; note = 2'-O-Methyl-cytidine
  modified_base 66: mod_base = OTHER; note = 2'-O-Methyl-uridine
  modified_base 67: mod_base = OTHER; note = 2'-O-Methyl-cytidine
  modified_base 70: mod_base = OTHER; note = 2'-O-Methyl-cytidine
  modified_base 71: mod_base = OTHER; note = 2'-O-Methyl-uridine
  modified_base 72: mod_base = OTHER; note = 2'-O-Methyl-uridine
  modified_base 74: mod_base = OTHER; note = 2'-O-Methyl-adenosine
  modified_base 75: mod_base = OTHER; note = 2'-O-Methyl-adenosine
  modified_base 76: mod_base = OTHER; note = 2'-O-Methyl-adenosine
  modified_base 77: mod_base = OTHER; note = 2'-O-Methyl-adenosine
  modified_base 78: mod_base = OTHER; note = 2'-O-Methyl-adenosine
  modified_base 79: mod_base = OTHER; note = 2'-O-Methyl-guanosine
  modified_base 80: mod_base = OTHER; note = 2'-O-Methyl-uridine
  modified_base 82: mod_base = OTHER; note = 2'-O-Methyl-guanosine
  modified_base 83: mod_base = OTHER; note = 2'-O-Methyl-cytidine
  modified_base 84: mod_base = OTHER; note = 2'-O-Methyl-adenosine
  modified_base 85: mod_base = OTHER; note = 2'-O-Methyl-cytidine
  modified_base 86: mod_base = OTHER; note = 2'-O-Methyl-cytidine
  modified_base 87: mod_base = OTHER; note = 2'-O-Methyl-guanosine
  modified_base 89: mod_base = OTHER; note = 2'-O-Methyl-guanosine
  modified_base 92: mod_base = OTHER; note = 2'-O-Methyl-guanosine
  modified_base 93: mod_base = OTHER; note = 2'-O-Methyl-guanosine
  modified_base 94: mod_base = OTHER; note = 2'-O-Methyl-uridine
  modified_base 95: mod_base = OTHER; note = 2'-O-Methyl-guanosine
  modified_base 96: mod_base = OTHER; note = 2'-O-Methyl-cytidine
  modified_base 97: mod_base = OTHER; note = 2'-O-Methyl-uridine
  modified_base 98: mod_base = OTHER; note = 2'-O-Methyl-uridine phosphorothioate
  modified_base 99: mod_base = OTHER; note = 2'-O-Methyl-uridine phosphorothioate
  modified_base 100: mod_base = OTHER; note = 2'-O-Methyl-uridine

SEQ ID NO: 2711 - RNA, 103 nt, synthetic construct; identical to SEQ ID NO: 1700
  source 1..103: mol_type = other RNA
  modified_base 1: mod_base = OTHER; note = 2'-O-Methyl-cytidine phosphorothioate
  modified_base 2: mod_base = OTHER; note = 2'-O-Methyl-adenosine phosphorothioate
  modified_base 3: mod_base = OTHER; note = 2'-O-Methyl-guanosine
  modified_base 21: mod_base = OTHER; note = 2'-O-Methyl-guanosine
  modified_base 25: mod_base = OTHER; note = uridine phosphorothioate
  modified_base 28: mod_base = OTHER; note = 2'-O-Methyl-adenosine
  modified_base 29: mod_base = OTHER; note = 2'-O-Methyl-guanosine
  modified_base 30: mod_base = OTHER; note = 2'-O-Methyl-cytidine
  modified_base 31: mod_base = OTHER; note = 2'-O-Methyl-uridine
  modified_base 32: mod_base = OTHER; note = 2'-O-Methyl-adenosine
  modified_base 33: mod_base = OTHER; note = 2'-O-Methyl-guanosine
  modified_base 34: mod_base = OTHER; note = 2'-O-Methyl-adenosine
  modified_base 35: mod_base = OTHER; note = 2'-O-Methyl-adenosine
  modified_base 36: mod_base = OTHER; note = 2'-O-Methyl-adenosine
  modified_base 37: mod_base = OTHER; note = 2'-O-Methyl-uridine
  modified_base 38: mod_base = OTHER; note = 2'-O-Methyl-adenosine
  modified_base 39: mod_base = OTHER; note = 2'-O-Methyl-guanosine
  modified_base 40: mod_base = OTHER; note = 2'-O-Methyl-cytidine
  modified_base 41: mod_base = OTHER; note = 2'-O-Methyl-adenosine
  modified_base 42: mod_base = OTHER; note = 2'-O-Methyl-adenosine
  modified_base 46: mod_base = OTHER; note = 2'-O-Methyl-adenosine
  modified_base 48: mod_base = OTHER; note = 2'-O-Methyl-adenosine
  modified_base 50: mod_base = OTHER; note = 2'-O-Methyl-uridine
  modified_base 52: mod_base = OTHER; note = 2'-O-Methyl-adenosine
  modified_base 53: mod_base = OTHER; note = 2'-O-Methyl-guanosine
  modified_base 54: mod_base = OTHER; note = 2'-O-Methyl-guanosine
  modified_base 55: mod_base = OTHER; note = 2'-O-Methyl-cytidine
  modified_base 56: mod_base = OTHER; note = 2'-O-Methyl-uridine
  modified_base 57: mod_base = OTHER; note = 2'-O-Methyl-adenosine
  modified_base 60: mod_base = OTHER; note = 2'-O-Methyl-cytidine
  modified_base 61: mod_base = OTHER; note = 2'-O-Methyl-cytidine
  modified_base 66: mod_base = OTHER; note = 2'-O-Methyl-uridine
  modified_base 67: mod_base = OTHER; note = 2'-O-Methyl-cytidine
  modified_base 70: mod_base = OTHER; note = 2'-O-Methyl-cytidine
  modified_base 71: mod_base = OTHER; note = 2'-O-Methyl-uridine
  modified_base 72: mod_base = OTHER; note = 2'-O-Methyl-uridine
  modified_base 74: mod_base = OTHER; note = 2'-O-Methyl-adenosine
  modified_base 75: mod_base = OTHER; note = 2'-O-Methyl-adenosine
  modified_base 76: mod_base = OTHER; note = 2'-O-Methyl-adenosine
  modified_base 77: mod_base = OTHER; note = 2'-O-Methyl-adenosine
  modified_base 78: mod_base = OTHER; note = 2'-O-Methyl-adenosine
  modified_base 79: mod_base = OTHER; note = 2'-O-Methyl-guanosine
  modified_base 80: mod_base = OTHER; note = 2'-O-Methyl-uridine
  modified_base 82: mod_base = OTHER; note = 2'-O-Methyl-guanosine
  modified_base 83: mod_base = OTHER; note = 2'-O-Methyl-cytidine
  modified_base 84: mod_base = OTHER; note = 2'-O-Methyl-adenosine
  modified_base 85: mod_base = OTHER; note = 2'-O-Methyl-cytidine
  modified_base 86: mod_base = OTHER; note = 2'-O-Methyl-cytidine
  modified_base 87: mod_base = OTHER; note = 2'-O-Methyl-guanosine
  modified_base 89: mod_base = OTHER; note = 2'-O-Methyl-guanosine
  modified_base 92: mod_base = OTHER; note = 2'-O-Methyl-guanosine
  modified_base 93: mod_base = OTHER; note = 2'-O-Methyl-guanosine
  modified_base 94: mod_base = OTHER; note = 2'-O-Methyl-uridine
  modified_base 95: mod_base = OTHER; note = 2'-O-Methyl-guanosine
  modified_base 96: mod_base = OTHER; note = 2'-O-Methyl-cytidine
  modified_base 97: mod_base = OTHER; note = 2'-O-Methyl-uridine
  modified_base 98: mod_base = OTHER; note = 2'-O-Methyl-uridine phosphorothioate
  modified_base 99: mod_base = OTHER; note = 2'-O-Methyl-uridine phosphorothioate
  modified_base 100: mod_base = OTHER; note = 2'-O-Methyl-uridine

SEQ ID NO: 2712 - RNA, 103 nt, synthetic construct; identical to SEQ ID NO: 1700
  source 1..103: mol_type = other RNA
  modified_base 1: mod_base = OTHER; note = 2'-O-Methyl-cytidine phosphorothioate
  modified_base 2: mod_base = OTHER; note = 2'-O-Methyl-adenosine phosphorothioate
  modified_base 3: mod_base = OTHER; note = 2'-O-Methyl-guanosine
  modified_base 21: mod_base = OTHER; note = 2'-O-Methyl-guanosine
  modified_base 25: mod_base = OTHER; note = uridine phosphorothioate
  modified_base 28: mod_base = OTHER; note = 2'-O-Methyl-adenosine
  modified_base 29: mod_base = OTHER; note = 2'-O-Methyl-guanosine
  modified_base 30: mod_base = OTHER; note = 2'-O-Methyl-cytidine
  modified_base 31: mod_base = OTHER; note = 2'-O-Methyl-uridine
  modified_base 32: mod_base = OTHER; note = 2'-O-Methyl-adenosine
  modified_base 33: mod_base = OTHER; note = 2'-O-Methyl-guanosine
  modified_base 34: mod_base = OTHER; note = 2'-O-Methyl-adenosine
  modified_base 35: mod_base = OTHER; note = 2'-O-Methyl-adenosine
  modified_base 36: mod_base = OTHER; note = 2'-O-Methyl-adenosine
  modified_base 37: mod_base = OTHER; note = 2'-O-Methyl-uridine
  modified_base 38: mod_base = OTHER; note = 2'-O-Methyl-adenosine
  modified_base 39: mod_base = OTHER; note = 2'-O-Methyl-guanosine
  modified_base 40: mod_base = OTHER; note = 2'-O-Methyl-cytidine
  modified_base 41: mod_base = OTHER; note = 2'-O-Methyl-adenosine
  modified_base 42: mod_base = OTHER; note = 2'-O-Methyl-adenosine
  modified_base 46: mod_base = OTHER; note = 2'-O-Methyl-adenosine
  modified_base 48: mod_base = OTHER; note = 2'-O-Methyl-adenosine
  modified_base 50: mod_base = OTHER; note = 2'-O-Methyl-uridine
  modified_base 52: mod_base = OTHER; note = 2'-O-Methyl-adenosine
  modified_base 53: mod_base = OTHER; note = 2'-O-Methyl-guanosine
  modified_base 54: mod_base = OTHER; note = 2'-O-Methyl-guanosine
  modified_base 57: mod_base = OTHER; note = 2'-O-Methyl-adenosine
  modified_base 61: mod_base = OTHER; note = 2'-O-Methyl-cytidine
  modified_base 66: mod_base = OTHER; note = 2'-O-Methyl-uridine
  modified_base 67: mod_base = OTHER; note = 2'-O-Methyl-cytidine
  modified_base 70: mod_base = OTHER; note = 2'-O-Methyl-cytidine
  modified_base 71: mod_base = OTHER; note = 2'-O-Methyl-uridine
  modified_base 72: mod_base = OTHER; note = 2'-O-Methyl-uridine
  modified_base 73: mod_base = OTHER; note = 2'-O-Methyl-guanosine
  modified_base 74: mod_base = OTHER; note = 2'-O-Methyl-adenosine
  modified_base 75: mod_base = OTHER; note = 2'-O-Methyl-adenosine
  modified_base 76: mod_base = OTHER; note = 2'-O-Methyl-adenosine
  modified_base 77: mod_base = OTHER; note = 2'-O-Methyl-adenosine
  modified_base 78: mod_base = OTHER; note = 2'-O-Methyl-adenosine
  modified_base 79: mod_base = OTHER; note = 2'-O-Methyl-guanosine
  modified_base 80: mod_base = OTHER; note = 2'-O-Methyl-uridine
  modified_base 82: mod_base = OTHER; note = 2'-O-Methyl-guanosine
  modified_base 83: mod_base = OTHER; note = 2'-O-Methyl-cytidine
  modified_base 84: mod_base = OTHER; note = 2'-O-Methyl-adenosine
  modified_base 85: mod_base = OTHER; note = 2'-O-Methyl-cytidine
  modified_base 86: mod_base = OTHER; note = 2'-O-Methyl-cytidine
  modified_base 87: mod_base = OTHER; note = 2'-O-Methyl-guanosine
  modified_base 89: mod_base = OTHER; note = 2'-O-Methyl-guanosine
  modified_base 92: mod_base = OTHER; note = 2'-O-Methyl-guanosine
  modified_base 93: mod_base = OTHER; note = 2'-O-Methyl-guanosine
  modified_base 94: mod_base = OTHER; note = 2'-O-Methyl-uridine
  modified_base 95: mod_base = OTHER; note = 2'-O-Methyl-guanosine
  modified_base 96: mod_base = OTHER; note = 2'-O-Methyl-cytidine
  modified_base 97: mod_base = OTHER; note = 2'-O-Methyl-uridine
  modified_base 98: mod_base = OTHER; note = 2'-O-Methyl-uridine phosphorothioate
  modified_base 99: mod_base = OTHER; note = 2'-O-Methyl-uridine phosphorothioate
  modified_base 100: mod_base = OTHER; note = 2'-O-Methyl-uridine

SEQ ID NO: 2713 - RNA, 103 nt, synthetic construct; identical to SEQ ID NO: 1700
  source 1..103: mol_type = other RNA
  modified_base 1: mod_base = OTHER; note = 2'-O-Methyl-cytidine phosphorothioate
  modified_base 2: mod_base = OTHER; note = 2'-O-Methyl-adenosine phosphorothioate
  modified_base 3: mod_base = OTHER; note = 2'-O-Methyl-guanosine
  modified_base 21: mod_base = OTHER; note = 2'-O-Methyl-guanosine
  modified_base 25: mod_base = OTHER; note = uridine phosphorothioate
  modified_base 28: mod_base = OTHER; note = 2'-O-Methyl-adenosine
  modified_base 29: mod_base = OTHER; note = 2'-O-Methyl-guanosine
  modified_base 30: mod_base = OTHER; note = 2'-O-Methyl-cytidine
  modified_base 31: mod_base = OTHER; note = 2'-O-Methyl-uridine
  modified_base 32: mod_base = OTHER; note = 2'-O-Methyl-adenosine
  modified_base 33: mod_base = OTHER; note = 2'-O-Methyl-guanosine
  modified_base 34: mod_base = OTHER; note = 2'-O-Methyl-adenosine
  modified_base 35: mod_base = OTHER; note = 2'-O-Methyl-adenosine
  modified_base 36: mod_base = OTHER; note = 2'-O-Methyl-adenosine
  modified_base 37: mod_base = OTHER; note = 2'-O-Methyl-uridine
  modified_base 38: mod_base = OTHER; note = 2'-O-Methyl-adenosine
  modified_base 39: mod_base = OTHER; note = 2'-O-Methyl-guanosine
  modified_base 40: mod_base = OTHER; note = 2'-O-Methyl-cytidine
  modified_base 41: mod_base = OTHER; note = 2'-O-Methyl-adenosine
  modified_base 42: mod_base = OTHER; note = 2'-O-Methyl-adenosine
  modified_base 46: mod_base = OTHER; note = 2'-O-Methyl-adenosine
  modified_base 48: mod_base = OTHER; note = 2'-O-Methyl-adenosine
  modified_base 50: mod_base = OTHER; note = 2'-O-Methyl-uridine
  modified_base 52: mod_base = OTHER; note = 2'-O-Methyl-adenosine
  modified_base 53: mod_base = OTHER; note = 2'-O-Methyl-guanosine
  modified_base 54: mod_base = OTHER; note = 2'-O-Methyl-guanosine
  modified_base 57: mod_base = OTHER; note = 2'-O-Methyl-adenosine
  modified_base 61: mod_base = OTHER; note = 2'-O-Methyl-cytidine
  modified_base 66: mod_base = OTHER; note = 2'-O-Methyl-uridine
  modified_base 67: mod_base = OTHER; note = 2'-O-Methyl-cytidine
  modified_base 70: mod_base = OTHER; note = 2'-O-Methyl-cytidine
  modified_base 71: mod_base = OTHER; note = 2'-O-Methyl-uridine
  modified_base 72: mod_base = OTHER; note = 2'-O-Methyl-uridine
  modified_base 73: mod_base = OTHER; note = 2'-O-Methyl-guanosine
  modified_base 74: mod_base = OTHER; note = 2'-O-Methyl-adenosine
  modified_base 75: mod_base = OTHER; note = 2'-O-Methyl-adenosine
  modified_base 76: mod_base = OTHER; note = 2'-O-Methyl-adenosine
  modified_base 77: mod_base = OTHER; note = 2'-O-Methyl-adenosine
  modified_base 78: mod_base = OTHER; note = 2'-O-Methyl-adenosine
  modified_base 79: mod_base = OTHER; note = 2'-O-Methyl-guanosine
  modified_base 80: mod_base = OTHER; note = 2'-O-Methyl-uridine
  modified_base 82: mod_base = OTHER; note = 2'-O-Methyl-guanosine
  modified_base 83: mod_base = OTHER; note = 2'-O-Methyl-cytidine
  modified_base 84: mod_base = OTHER; note = 2'-O-Methyl-adenosine
  modified_base 85: mod_base = OTHER; note = 2'-O-Methyl-cytidine
  modified_base 86: mod_base = OTHER; note = 2'-O-Methyl-cytidine
  modified_base 87: mod_base = OTHER; note = 2'-O-Methyl-guanosine
  modified_base 89: mod_base = OTHER; note = 2'-O-Methyl-guanosine
  modified_base 91: mod_base = OTHER; note = 2'-O-Methyl-cytidine
  modified_base 92: mod_base = OTHER; note = 2'-O-Methyl-guanosine
  modified_base 93: mod_base = OTHER; note = 2'-O-Methyl-guanosine
  modified_base 94: mod_base = OTHER; note = 2'-O-Methyl-uridine
  modified_base 95: mod_base = OTHER; note = 2'-O-Methyl-guanosine
  modified_base 96: mod_base = OTHER; note = 2'-O-Methyl-cytidine
  modified_base 97: mod_base = OTHER; note = 2'-O-Methyl-uridine
  modified_base 98: mod_base = OTHER; note = 2'-O-Methyl-uridine phosphorothioate
  modified_base 99: mod_base = OTHER; note = 2'-O-Methyl-uridine phosphorothioate
  modified_base 100: mod_base = OTHER; note = 2'-O-Methyl-uridine

SEQ ID NO: 2714 - RNA, 103 nt, synthetic construct; identical to SEQ ID NO: 1700
  source 1..103: mol_type = other RNA
  modified_base 1: mod_base = OTHER; note = 2'-O-Methyl-cytidine phosphorothioate
  modified_base 2: mod_base = OTHER; note = 2'-O-Methyl-adenosine phosphorothioate
  modified_base 3: mod_base = OTHER; note = 2'-O-Methyl-guanosine
  modified_base 21: mod_base = OTHER; note = 2'-O-Methyl-guanosine
  modified_base 25: mod_base = OTHER; note = uridine phosphorothioate
  modified_base 28: mod_base = OTHER; note = 2'-O-Methyl-adenosine
  modified_base 29: mod_base = OTHER; note = 2'-O-Methyl-guanosine
  modified_base 30: mod_base = OTHER; note = 2'-O-Methyl-cytidine
  modified_base 31: mod_base = OTHER; note = 2'-O-Methyl-uridine
  modified_base 32: mod_base = OTHER; note = 2'-O-Methyl-adenosine
  modified_base 34: mod_base = OTHER; note = 2'-O-Methyl-adenosine
  modified_base 35: mod_base = OTHER; note = 2'-O-Methyl-adenosine
  modified_base 36: mod_base = OTHER; note = 2'-O-Methyl-adenosine
  modified_base 37: mod_base = OTHER; note = 2'-O-Methyl-uridine
  modified_base 38: mod_base = OTHER; note = 2'-O-Methyl-adenosine
  modified_base 39: mod_base = OTHER; note = 2'-O-Methyl-guanosine
  modified_base 40: mod_base = OTHER; note = 2'-O-Methyl-cytidine
  modified_base 41: mod_base = OTHER; note = 2'-O-Methyl-adenosine
  modified_base 42: mod_base = OTHER; note = 2'-O-Methyl-adenosine
  modified_base 46: mod_base = OTHER; note = 2'-O-Methyl-adenosine
  modified_base 48: mod_base = OTHER; note = 2'-O-Methyl-adenosine
  modified_base 50: mod_base = OTHER; note = 2'-O-Methyl-uridine
  modified_base 52: mod_base = OTHER; note = 2'-O-Methyl-adenosine
  modified_base 53: mod_base = OTHER; note = 2'-O-Methyl-guanosine
  modified_base 54: mod_base = OTHER; note = 2'-O-Methyl-guanosine
  modified_base 57: mod_base = OTHER; note = 2'-O-Methyl-adenosine
  modified_base 61: mod_base = OTHER; note = 2'-O-Methyl-cytidine
  modified_base 66: mod_base = OTHER; note = 2'-O-Methyl-uridine
  modified_base 67: mod_base = OTHER; note = 2'-O-Methyl-cytidine
  modified_base 70: mod_base = OTHER; note = 2'-O-Methyl-cytidine
  modified_base 71: mod_base = OTHER; note = 2'-O-Methyl-uridine
  modified_base 72: mod_base = OTHER; note = 2'-O-Methyl-uridine
  modified_base 73: mod_base = OTHER; note = 2'-O-Methyl-guanosine
  modified_base 74: mod_base = OTHER; note = 2'-O-Methyl-adenosine
  modified_base 75: mod_base = OTHER; note = 2'-O-Methyl-adenosine
  modified_base 76: mod_base = OTHER; note = 2'-O-Methyl-adenosine
  modified_base 77: mod_base = OTHER; note = 2'-O-Methyl-adenosine
  modified_base 78: mod_base = OTHER; note = 2'-O-Methyl-adenosine
  modified_base 79: mod_base = OTHER; note = 2'-O-Methyl-guanosine
  modified_base 80: mod_base = OTHER; note = 2'-O-Methyl-uridine
  modified_base 82: mod_base = OTHER; note = 2'-O-Methyl-guanosine
  modified_base 83: mod_base = OTHER; note = 2'-O-Methyl-cytidine
  modified_base 84: mod_base = OTHER; note = 2'-O-Methyl-adenosine
  modified_base 85: mod_base = OTHER; note = 2'-O-Methyl-cytidine
  modified_base 86: mod_base = OTHER; note = 2'-O-Methyl-cytidine
  modified_base 87: mod_base = OTHER; note = 2'-O-Methyl-guanosine
  modified_base 89: mod_base = OTHER; note = 2'-O-Methyl-guanosine
  modified_base 91: mod_base = OTHER; note = 2'-O-Methyl-cytidine
  modified_base 92: mod_base = OTHER; note = 2'-O-Methyl-guanosine
  modified_base 93: mod_base = OTHER; note = 2'-O-Methyl-guanosine
  modified_base 94: mod_base = OTHER; note = 2'-O-Methyl-uridine
  modified_base 95: mod_base = OTHER; note = 2'-O-Methyl-guanosine
  modified_base 96: mod_base = OTHER; note = 2'-O-Methyl-cytidine
  modified_base 97: mod_base = OTHER; note = 2'-O-Methyl-uridine
  modified_base 98: mod_base = OTHER; note = 2'-O-Methyl-uridine phosphorothioate
  modified_base 99: mod_base = OTHER; note = 2'-O-Methyl-uridine phosphorothioate
  modified_base 100: mod_base = OTHER; note = 2'-O-Methyl-uridine

SEQ ID NO: 2715 - RNA, 103 nt, synthetic construct; identical to SEQ ID NO: 1700
  source 1..103: mol_type = other RNA
  modified_base 1: mod_base = OTHER; note = 2'-O-Methyl-cytidine phosphorothioate
  modified_base 2: mod_base = OTHER; note = 2'-O-Methyl-adenosine phosphorothioate
  modified_base 3: mod_base = OTHER; note = 2'-O-Methyl-guanosine
  modified_base 21: mod_base = OTHER; note = 2'-O-Methyl-guanosine
  modified_base 25: mod_base = OTHER; note = uridine phosphorothioate
  modified_base 28: mod_base = OTHER; note = 2'-O-Methyl-adenosine
  modified_base 29: mod_base = OTHER; note = 2'-O-Methyl-guanosine
  modified_base 30: mod_base = OTHER; note = 2'-O-Methyl-cytidine
  modified_base 31: mod_base = OTHER; note = 2'-O-Methyl-uridine
  modified_base 32: mod_base = OTHER; note = 2'-O-Methyl-adenosine
  modified_base 34: mod_base = OTHER; note = 2'-O-Methyl-adenosine
  modified_base 35: mod_base = OTHER; note = 2'-O-Methyl-adenosine
  modified_base 36: mod_base = OTHER; note = 2'-O-Methyl-adenosine
  modified_base 37: mod_base = OTHER; note = 2'-O-Methyl-uridine
  modified_base 38: mod_base = OTHER; note = 2'-O-Methyl-adenosine
  modified_base 39: mod_base = OTHER; note = 2'-O-Methyl-guanosine
  modified_base 40: mod_base = OTHER; note = 2'-O-Methyl-cytidine
  modified_base 41: mod_base = OTHER; note = 2'-O-Methyl-adenosine
  modified_base 42: mod_base = OTHER; note = 2'-O-Methyl-adenosine
  modified_base 46: mod_base = OTHER; note = 2'-O-Methyl-adenosine
  modified_base 48: mod_base = OTHER; note = 2'-O-Methyl-adenosine
  modified_base 50: mod_base = OTHER; note = 2'-O-Methyl-uridine
  modified_base 52: mod_base = OTHER; note = 2'-O-Methyl-adenosine
  modified_base 53: mod_base = OTHER; note = 2'-O-Methyl-guanosine
  modified_base 54: mod_base = OTHER; note = 2'-O-Methyl-guanosine
  modified_base 55: mod_base = OTHER; note = 2'-O-Methyl-cytidine
  modified_base 56: mod_base = OTHER; note = 2'-O-Methyl-uridine
  modified_base 57: mod_base = OTHER; note = 2'-O-Methyl-adenosine
  modified_base 60: mod_base = OTHER; note = 2'-O-Methyl-cytidine
  modified_base 61: mod_base = OTHER; note = 2'-O-Methyl-cytidine
  modified_base 66: mod_base = OTHER; note = 2'-O-Methyl-uridine
  modified_base 67: mod_base = OTHER; note = 2'-O-Methyl-cytidine
  modified_base 70: mod_base = OTHER; note = 2'-O-Methyl-cytidine
  modified_base 71: mod_base = OTHER; note = 2'-O-Methyl-uridine
  modified_base 72: mod_base = OTHER; note = 2'-O-Methyl-uridine
  modified_base 74: mod_base = OTHER; note = 2'-O-Methyl-adenosine
  modified_base 75: mod_base = OTHER; note = 2'-O-Methyl-adenosine
  modified_base 76: mod_base = OTHER; note = 2'-O-Methyl-adenosine
  modified_base 77: mod_base = OTHER; note = 2'-O-Methyl-adenosine
  modified_base 78: mod_base = OTHER; note = 2'-O-Methyl-adenosine
  modified_base 79: mod_base = OTHER; note = 2'-O-Methyl-guanosine
  modified_base 80: mod_base = OTHER; note = 2'-O-Methyl-uridine
  modified_base 82: mod_base = OTHER; note = 2'-O-Methyl-guanosine
  modified_base 83: mod_base = OTHER; note = 2'-O-Methyl-cytidine
  modified_base 84: mod_base = OTHER; note = 2'-O-Methyl-adenosine
  modified_base 85: mod_base = OTHER; note = 2'-O-Methyl-cytidine
  modified_base 86: mod_base = OTHER; note = 2'-O-Methyl-cytidine
  modified_base 87: mod_base = OTHER; note = 2'-O-Methyl-guanosine
  modified_base 89: mod_base = OTHER; note = 2'-O-Methyl-guanosine
  modified_base 92: mod_base = OTHER; note = 2'-O-Methyl-guanosine
  modified_base 93: mod_base = OTHER; note = 2'-O-Methyl-guanosine
  modified_base 94: mod_base = OTHER; note = 2'-O-Methyl-uridine
  modified_base 95: mod_base = OTHER; note = 2'-O-Methyl-guanosine
  modified_base 96: mod_base = OTHER; note = 2'-O-Methyl-cytidine
  modified_base 97: mod_base = OTHER; note = 2'-O-Methyl-uridine
  modified_base 98: mod_base = OTHER; note = 2'-O-Methyl-uridine phosphorothioate
  modified_base 99: mod_base = OTHER; note = 2'-O-Methyl-uridine phosphorothioate
  modified_base 100: mod_base = OTHER; note = 2'-O-Methyl-uridine

SEQ ID NO: 2716 - RNA, 103 nt, synthetic construct; identical to SEQ ID NO: 1643
  source 1..103: mol_type = other RNA
  modified_base 1: mod_base = OTHER; note = 2'-O-Methyl-cytidine phosphorothioate
  modified_base 2: mod_base = OTHER; note = 2'-O-Methyl-cytidine phosphorothioate
  modified_base 3: mod_base = OTHER; note = 2'-O-Methyl-cytidine
  modified_base 21: mod_base = OTHER; note = 2'-O-Methyl-guanosine
  modified_base 28: mod_base = OTHER; note = 2'-O-Methyl-adenosine
  modified_base 29: mod_base = OTHER; note = 2'-O-Methyl-guanosine
  modified_base 30: mod_base = OTHER; note = 2'-O-Methyl-cytidine
  modified_base 31: mod_base = OTHER; note = 2'-O-Methyl-uridine
  modified_base 32: mod_base = OTHER; note = 2'-O-Methyl-adenosine
  modified_base 33: mod_base = OTHER; note = 2'-O-Methyl-guanosine
  modified_base 34: mod_base = OTHER; note = 2'-O-Methyl-adenosine
  modified_base 35: mod_base = OTHER; note = 2'-O-Methyl-adenosine
  modified_base 36: mod_base = OTHER; note = 2'-O-Methyl-adenosine
  modified_base 37: mod_base = OTHER; note = 2'-O-Methyl-uridine
  modified_base 38: mod_base = OTHER; note = 2'-O-Methyl-adenosine
  modified_base 39: mod_base = OTHER; note = 2'-O-Methyl-guanosine
  modified_base 40: mod_base = OTHER; note = 2'-O-Methyl-cytidine
  modified_base 41: mod_base = OTHER; note = 2'-O-Methyl-adenosine
  modified_base 42: mod_base = OTHER; note = 2'-O-Methyl-adenosine
  modified_base 45: mod_base = OTHER; note = uridine phosphorothioate
  modified_base 46: mod_base = OTHER; note = 2'-O-Methyl-adenosine
  modified_base 48: mod_base = OTHER; note = 2'-O-Methyl-adenosine
  modified_base 50: mod_base = OTHER; note = 2'-O-Methyl-uridine
  modified_base 52: mod_base = OTHER; note = 2'-O-Methyl-adenosine
  modified_base 53: mod_base = OTHER; note = 2'-O-Methyl-guanosine
  modified_base 54: mod_base = OTHER; note = 2'-O-Methyl-guanosine
  modified_base 55: mod_base = OTHER; note = 2'-O-Methyl-cytidine
  modified_base 56: mod_base = OTHER; note = 2'-O-Methyl-uridine
  modified_base 57: mod_base = OTHER; note = 2'-O-Methyl-adenosine
  modified_base 60: mod_base = OTHER; note = 2'-O-Methyl-cytidine
  modified_base 61: mod_base = OTHER; note = 2'-O-Methyl-cytidine
  modified_base 64: mod_base = OTHER; note = uridine phosphorothioate
  modified_base 66: mod_base = OTHER; note = 2'-O-Methyl-uridine
  modified_base 67: mod_base = OTHER; note = 2'-O-Methyl-cytidine
  modified_base 70: mod_base = OTHER; note = 2'-O-Methyl-cytidine
  modified_base 71: mod_base = OTHER; note = 2'-O-Methyl-uridine
  modified_base 72: mod_base = OTHER; note = 2'-O-Methyl-uridine
  modified_base 73: mod_base = OTHER; note = 2'-O-Methyl-guanosine
  modified_base 74: mod_base = OTHER; note = 2'-O-Methyl-adenosine
  modified_base 75: mod_base = OTHER; note = 2'-O-Methyl-adenosine
  modified_base 76: mod_base = OTHER; note = 2'-O-Methyl-adenosine
  modified_base 77: mod_base = OTHER; note = 2'-O-Methyl-adenosine
  modified_base 78: mod_base = OTHER; note = 2'-O-Methyl-adenosine
  modified_base 79: mod_base = OTHER; note = 2'-O-Methyl-guanosine
  modified_base 80: mod_base = OTHER; note = 2'-O-Methyl-uridine
  modified_base 81: mod_base = OTHER; note = 2'-O-Methyl-guanosine
  modified_base 83: mod_base = OTHER; note = 2'-O-Methyl-cytidine
  modified_base 84: mod_base = OTHER; note = 2'-O-Methyl-adenosine
  modified_base 85: mod_base = OTHER; note = 2'-O-Methyl-cytidine
  modified_base 86: mod_base = OTHER; note = 2'-O-Methyl-cytidine
  modified_base 87: mod_base = OTHER; note = 2'-O-Methyl-guanosine
  modified_base 88: mod_base = OTHER; note = 2'-O-Methyl-adenosine
  modified_base 89: mod_base = OTHER; note = 2'-O-Methyl-guanosine
  modified_base 90: mod_base = OTHER; note = 2'-O-Methyl-uridine
  modified_base 91: mod_base = OTHER; note = 2'-O-Methyl-cytidine
  modified_base 92: mod_base = OTHER; note = 2'-O-Methyl-guanosine
  modified_base 93: mod_base = OTHER; note = 2'-O-Methyl-guanosine
  modified_base 94: mod_base = OTHER; note = 2'-O-Methyl-uridine
  modified_base 95: mod_base = OTHER; note = 2'-O-Methyl-guanosine
  modified_base 96: mod_base = OTHER; note = 2'-O-Methyl-cytidine
  modified_base 97: mod_base = OTHER; note = 2'-O-Methyl-uridine
  modified_base 98: mod_base = OTHER; note = 2'-O-Methyl-uridine phosphorothioate
  modified_base 99: mod_base = OTHER; note = 2'-O-Methyl-uridine phosphorothioate
  modified_base 100: mod_base = OTHER; note = 2'-O-Methyl-uridine

SEQ ID NO: 2717 - RNA, 103 nt, synthetic construct; identical to SEQ ID NO: 1643
  source 1..103: mol_type = other RNA
  modified_base 1: mod_base = OTHER; note = 2'-O-Methyl-cytidine phosphorothioate
  modified_base 2: mod_base = OTHER; note = 2'-O-Methyl-cytidine phosphorothioate
  modified_base 3: mod_base = OTHER; note = 2'-O-Methyl-cytidine
  modified_base 21: mod_base = OTHER; note = 2'-O-Methyl-guanosine
  modified_base 28: mod_base = OTHER; note = 2'-O-Methyl-adenosine
  modified_base 29: mod_base = OTHER; note = 2'-O-Methyl-guanosine
  modified_base 30: mod_base = OTHER; note = 2'-O-Methyl-cytidine
  modified_base 31: mod_base = OTHER; note = 2'-O-Methyl-uridine
  modified_base 32: mod_base = OTHER; note = 2'-O-Methyl-adenosine
  modified_base 34: mod_base = OTHER; note = 2'-O-Methyl-adenosine
  modified_base 35: mod_base = OTHER; note = 2'-O-Methyl-adenosine
  modified_base 36: mod_base = OTHER; note = 2'-O-Methyl-adenosine
  modified_base 37: mod_base = OTHER; note = 2'-O-Methyl-uridine
  modified_base 38: mod_base = OTHER; note = 2'-O-Methyl-adenosine
  modified_base 39: mod_base = OTHER; note = 2'-O-Methyl-guanosine
  modified_base 40: mod_base = OTHER; note = 2'-O-Methyl-cytidine
  modified_base 41: mod_base = OTHER; note = 2'-O-Methyl-adenosine
  modified_base 42: mod_base = OTHER; note = 2'-O-Methyl-adenosine
  modified_base 45: mod_base = OTHER; note = uridine phosphorothioate
  modified_base 46: mod_base = OTHER; note = 2'-O-Methyl-adenosine
  modified_base 48: mod_base = OTHER; note = 2'-O-Methyl-adenosine
  modified_base 50: mod_base = OTHER; note = 2'-O-Methyl-uridine
  modified_base 52: mod_base = OTHER; note = 2'-O-Methyl-adenosine
  modified_base 53: mod_base = OTHER; note = 2'-O-Methyl-guanosine
  modified_base 54: mod_base = OTHER; note = 2'-O-Methyl-guanosine
  modified_base 55: mod_base = OTHER; note = 2'-O-Methyl-cytidine
  modified_base 56: mod_base = OTHER; note = 2'-O-Methyl-uridine
  modified_base 57: mod_base = OTHER; note = 2'-O-Methyl-adenosine
  modified_base 60: mod_base = OTHER; note = 2'-O-Methyl-cytidine
  modified_base 61: mod_base = OTHER; note = 2'-O-Methyl-cytidine
  modified_base 64: mod_base = OTHER; note = uridine phosphorothioate
  modified_base 66: mod_base = OTHER; note = 2'-O-Methyl-uridine
  modified_base 67: mod_base = OTHER; note = 2'-O-Methyl-cytidine
  modified_base 70: mod_base = OTHER; note = 2'-O-Methyl-cytidine
  modified_base 71: mod_base = OTHER; note = 2'-O-Methyl-uridine
  modified_base 72: mod_base = OTHER; note = 2'-O-Methyl-uridine
  modified_base 74: mod_base = OTHER; note = 2'-O-Methyl-adenosine
  modified_base 75: mod_base = OTHER; note = 2'-O-Methyl-adenosine
  modified_base 76: mod_base = OTHER; note = 2'-O-Methyl-adenosine
  modified_base 77: mod_base = OTHER; note = 2'-O-Methyl-adenosine
  modified_base 78: mod_base = OTHER; note = 2'-O-Methyl-adenosine
  modified_base 79: mod_base = OTHER; note = 2'-O-Methyl-guanosine
  modified_base 80: mod_base = OTHER; note = 2'-O-Methyl-uridine
  modified_base 81: mod_base = OTHER; note = 2'-O-Methyl-guanosine
  modified_base 83: mod_base = OTHER; note = 2'-O-Methyl-cytidine
  modified_base 84: mod_base = OTHER; note = 2'-O-Methyl-adenosine
  modified_base 85: mod_base = OTHER; note = 2'-O-Methyl-cytidine
  modified_base 86: mod_base = OTHER; note = 2'-O-Methyl-cytidine
  modified_base 87: mod_base = OTHER; note = 2'-O-Methyl-guanosine
  modified_base 88: mod_base = OTHER; note = 2'-O-Methyl-adenosine
  modified_base 89: mod_base = OTHER; note = 2'-O-Methyl-guanosine
  modified_base 90: mod_base = OTHER; note = 2'-O-Methyl-uridine
  modified_base 91: mod_base = OTHER; note = 2'-O-Methyl-cytidine
  modified_base 92: mod_base = OTHER; note = 2'-O-Methyl-guanosine
  modified_base 93: mod_base = OTHER; note = 2'-O-Methyl-guanosine
  modified_base 94: mod_base = OTHER; note = 2'-O-Methyl-uridine
  modified_base 95: mod_base = OTHER; note = 2'-O-Methyl-guanosine
  modified_base 96: mod_base = OTHER; note = 2'-O-Methyl-cytidine
  modified_base 97: mod_base = OTHER; note = 2'-O-Methyl-uridine
  modified_base 98: mod_base = OTHER; note = 2'-O-Methyl-uridine phosphorothioate
  modified_base 99: mod_base = OTHER; note = 2'-O-Methyl-uridine phosphorothioate
  modified_base 100: mod_base = OTHER; note = 2'-O-Methyl-uridine

SEQ ID NO: 2718 - RNA, 103 nt, synthetic construct; identical to SEQ ID NO: 1699
  source 1..103: mol_type = other RNA
  modified_base 1: mod_base = OTHER; note = 2'-O-Methyl-guanosine phosphorothioate
  modified_base 2: mod_base = OTHER; note = 2'-O-Methyl-adenosine phosphorothioate
  modified_base 3: mod_base = OTHER; note = 2'-O-Methyl-guanosine
  modified_base 21: mod_base = OTHER; note = 2'-O-Methyl-guanosine
  modified_base 28: mod_base = OTHER; note = 2'-O-Methyl-adenosine
  modified_base 29: mod_base = OTHER; note = 2'-O-Methyl-guanosine
  modified_base 30: mod_base = OTHER; note = 2'-O-Methyl-cytidine
  modified_base 31: mod_base = OTHER; note = 2'-O-Methyl-uridine
  modified_base 32: mod_base = OTHER; note = 2'-O-Methyl-adenosine
  modified_base 33: mod_base = OTHER; note = 2'-O-Methyl-guanosine
  modified_base 34: mod_base = OTHER; note = 2'-O-Methyl-adenosine
  modified_base 35: mod_base = OTHER; note = 2'-O-Methyl-adenosine
  modified_base 36: mod_base = OTHER; note = 2'-O-Methyl-adenosine
  modified_base 37: mod_base = OTHER; note = 2'-O-Methyl-uridine
  modified_base 38: mod_base = OTHER; note = 2'-O-Methyl-adenosine
  modified_base 39: mod_base = OTHER; note = 2'-O-Methyl-guanosine
  modified_base 40: mod_base = OTHER; note = 2'-O-Methyl-cytidine
  modified_base 41: mod_base = OTHER; note = 2'-O-Methyl-adenosine
  modified_base 42: mod_base = OTHER; note = 2'-O-Methyl-adenosine
  modified_base 45: mod_base = OTHER; note = uridine phosphorothioate
  modified_base 46: mod_base = OTHER; note = 2'-O-Methyl-adenosine
  modified_base 48: mod_base = OTHER; note = 2'-O-Methyl-adenosine
  modified_base 50: mod_base = OTHER; note = 2'-O-Methyl-uridine
  modified_base 52: mod_base = OTHER; note = 2'-O-Methyl-adenosine
  modified_base 53: mod_base = OTHER; note = 2'-O-Methyl-guanosine
  modified_base 54: mod_base = OTHER; note = 2'-O-Methyl-guanosine
  modified_base 55: mod_base = OTHER; note = 2'-O-Methyl-cytidine
  modified_base 56: mod_base = OTHER; note = 2'-O-Methyl-uridine
  modified_base 57: mod_base = OTHER; note = 2'-O-Methyl-adenosine
  modified_base 60: mod_base = OTHER; note = 2'-O-Methyl-cytidine
  modified_base 61: mod_base = OTHER; note = 2'-O-Methyl-cytidine
  modified_base 64: mod_base = OTHER; note = uridine phosphorothioate
  modified_base 66: mod_base = OTHER; note = 2'-O-Methyl-uridine
  modified_base 67: mod_base = OTHER; note = 2'-O-Methyl-cytidine
  modified_base 70: mod_base = OTHER; note = 2'-O-Methyl-cytidine
  modified_base 71: mod_base = OTHER; note = 2'-O-Methyl-uridine
  modified_base 72: mod_base = OTHER; note = 2'-O-Methyl-uridine
  modified_base 73: mod_base = OTHER; note = 2'-O-Methyl-guanosine
  modified_base 74: mod_base = OTHER; note = 2'-O-Methyl-adenosine
  modified_base 75: mod_base = OTHER; note = 2'-O-Methyl-adenosine
  modified_base 76: mod_base = OTHER; note = 2'-O-Methyl-adenosine
  modified_base 77: mod_base = OTHER; note = 2'-O-Methyl-adenosine
  modified_base 78: mod_base = OTHER; note = 2'-O-Methyl-adenosine
  modified_base 79: mod_base = OTHER; note = 2'-O-Methyl-guanosine
  modified_base 80: mod_base = OTHER; note = 2'-O-Methyl-uridine
  modified_base 81: mod_base = OTHER; note = 2'-O-Methyl-guanosine
  modified_base 83: mod_base = OTHER; note = 2'-O-Methyl-cytidine
  modified_base 84: mod_base = OTHER; note = 2'-O-Methyl-adenosine
  modified_base 85: mod_base = OTHER; note = 2'-O-Methyl-cytidine
  modified_base 86: mod_base = OTHER; note = 2'-O-Methyl-cytidine
  modified_base 87: mod_base = OTHER; note = 2'-O-Methyl-guanosine
  modified_base 88: mod_base = OTHER; note = 2'-O-Methyl-adenosine
  modified_base 89: mod_base = OTHER; note = 2'-O-Methyl-guanosine
  modified_base 90: mod_base = OTHER; note = 2'-O-Methyl-uridine
  modified_base 91: mod_base = OTHER; note = 2'-O-Methyl-cytidine
  modified_base 92: mod_base = OTHER; note = 2'-O-Methyl-guanosine
  modified_base 93: mod_base = OTHER; note = 2'-O-Methyl-guanosine
  modified_base 94: mod_base = OTHER; note = 2'-O-Methyl-uridine
  modified_base 95: mod_base = OTHER; note = 2'-O-Methyl-guanosine
  modified_base 96: mod_base = OTHER; note = 2'-O-Methyl-cytidine
  modified_base 97: mod_base = OTHER; note = 2'-O-Methyl-uridine
  modified_base 98: mod_base = OTHER; note = 2'-O-Methyl-uridine phosphorothioate
  modified_base 99: mod_base = OTHER; note = 2'-O-Methyl-uridine phosphorothioate
  modified_base 100: mod_base = OTHER; note = 2'-O-Methyl-uridine

SEQ ID NO: 2719 - RNA, 103 nt, synthetic construct; identical to SEQ ID NO: 1699
  source 1..103: mol_type = other RNA
  modified_base 1: mod_base = OTHER; note = 2'-O-Methyl-guanosine phosphorothioate
  modified_base 2: mod_base = OTHER; note = 2'-O-Methyl-adenosine phosphorothioate
  modified_base 3: mod_base = OTHER; note = 2'-O-Methyl-guanosine
  modified_base 21: mod_base = OTHER; note = 2'-O-Methyl-guanosine
  modified_base 28: mod_base = OTHER; note = 2'-O-Methyl-adenosine
  modified_base 29: mod_base = OTHER; note = 2'-O-Methyl-guanosine
  modified_base 30: mod_base = OTHER; note = 2'-O-Methyl-cytidine
  modified_base 31: mod_base = OTHER; note = 2'-O-Methyl-uridine
  modified_base 32: mod_base = OTHER; note = 2'-O-Methyl-adenosine
  modified_base 34: mod_base = OTHER; note = 2'-O-Methyl-adenosine
  modified_base 35: mod_base = OTHER; note = 2'-O-Methyl-adenosine
  modified_base 36: mod_base = OTHER; note = 2'-O-Methyl-adenosine
  modified_base 37: mod_base = OTHER; note = 2'-O-Methyl-uridine
  modified_base 38: mod_base = OTHER; note = 2'-O-Methyl-adenosine
  modified_base 39: mod_base = OTHER; note = 2'-O-Methyl-guanosine
  modified_base 40: mod_base = OTHER; note = 2'-O-Methyl-cytidine
  modified_base 41: mod_base = OTHER; note = 2'-O-Methyl-adenosine
  modified_base 42: mod_base = OTHER; note = 2'-O-Methyl-adenosine
  modified_base 45: mod_base = OTHER; note = uridine phosphorothioate
  modified_base 46: mod_base = OTHER; note = 2'-O-Methyl-adenosine
  modified_base 48: mod_base = OTHER; note = 2'-O-Methyl-adenosine
  modified_base 50: mod_base = OTHER; note = 2'-O-Methyl-uridine
  modified_base 52: mod_base = OTHER; note = 2'-O-Methyl-adenosine
  modified_base 53: mod_base = OTHER; note = 2'-O-Methyl-guanosine
  modified_base 54: mod_base = OTHER; note = 2'-O-Methyl-guanosine
  modified_base 55: mod_base = OTHER; note = 2'-O-Methyl-cytidine
  modified_base 56: mod_base = OTHER; note = 2'-O-Methyl-uridine
  modified_base 57: mod_base = OTHER; note = 2'-O-Methyl-adenosine
  modified_base 60: mod_base = OTHER; note = 2'-O-Methyl-cytidine
  modified_base 61: mod_base = OTHER; note = 2'-O-Methyl-cytidine
  modified_base 64: mod_base = OTHER; note = uridine phosphorothioate
  modified_base 66: mod_base = OTHER; note = 2'-O-Methyl-uridine
  modified_base 67: mod_base = OTHER; note = 2'-O-Methyl-cytidine
  modified_base 70: mod_base = OTHER; note = 2'-O-Methyl-cytidine
  modified_base 71: mod_base = OTHER; note = 2'-O-Methyl-uridine
  modified_base 72: mod_base = OTHER; note = 2'-O-Methyl-uridine
  modified_base 74: mod_base = OTHER; note = 2'-O-Methyl-adenosine
  modified_base 75: mod_base = OTHER; note = 2'-O-Methyl-adenosine
  modified_base 76: mod_base = OTHER; note = 2'-O-Methyl-adenosine
  modified_base 77: mod_base = OTHER; note = 2'-O-Methyl-adenosine
  modified_base 78: mod_base = OTHER; note = 2'-O-Methyl-adenosine
  modified_base 79: mod_base = OTHER; note = 2'-O-Methyl-guanosine
  modified_base 80: mod_base = OTHER; note = 2'-O-Methyl-uridine
  modified_base 81: mod_base = OTHER; note = 2'-O-Methyl-guanosine
  modified_base 83: mod_base = OTHER; note = 2'-O-Methyl-cytidine
  modified_base 84: mod_base = OTHER; note = 2'-O-Methyl-adenosine
  modified_base 85: mod_base = OTHER; note = 2'-O-Methyl-cytidine
  modified_base 86: mod_base = OTHER; note = 2'-O-Methyl-cytidine
  modified_base 87: mod_base = OTHER; note = 2'-O-Methyl-guanosine
  modified_base 88: mod_base = OTHER; note = 2'-O-Methyl-adenosine
  modified_base 89: mod_base = OTHER; note = 2'-O-Methyl-guanosine
  modified_base 90: mod_base = OTHER; note = 2'-O-Methyl-uridine
  modified_base 91: mod_base = OTHER; note = 2'-O-Methyl-cytidine
  modified_base 92: mod_base = OTHER; note = 2'-O-Methyl-guanosine
  modified_base 93: mod_base = OTHER; note = 2'-O-Methyl-guanosine
  modified_base 94: mod_base = OTHER; note = 2'-O-Methyl-uridine
  modified_base 95: mod_base = OTHER; note = 2'-O-Methyl-guanosine
  modified_base 96: mod_base = OTHER; note = 2'-O-Methyl-cytidine
  modified_base 97: mod_base = OTHER; note = 2'-O-Methyl-uridine
  modified_base 98: mod_base = OTHER; note = 2'-O-Methyl-uridine phosphorothioate
  modified_base 99: mod_base = OTHER; note = 2'-O-Methyl-uridine phosphorothioate
  modified_base 100: mod_base = OTHER; note = 2'-O-Methyl-uridine

SEQ ID NO: 2720 - RNA, 103 nt, synthetic construct; identical to SEQ ID NO: 1700
  source 1..103: mol_type = other RNA
  modified_base 1: mod_base = OTHER; note = 2'-O-Methyl-cytidine phosphorothioate
  modified_base 2: mod_base = OTHER; note = 2'-O-Methyl-adenosine phosphorothioate
  modified_base 3: mod_base = OTHER; note = 2'-O-Methyl-guanosine
  modified_base 21: mod_base = OTHER; note = 2'-O-Methyl-guanosine
  modified_base 28: mod_base = OTHER; note = 2'-O-Methyl-adenosine
  modified_base 29: mod_base = OTHER; note = 2'-O-Methyl-guanosine
  modified_base 30: mod_base = OTHER; note = 2'-O-Methyl-cytidine
  modified_base 31: mod_base = OTHER; note = 2'-O-Methyl-uridine
  modified_base 32: mod_base = OTHER; note = 2'-O-Methyl-adenosine
  modified_base 33: mod_base = OTHER; note = 2'-O-Methyl-guanosine
  modified_base 34: mod_base = OTHER; note = 2'-O-Methyl-adenosine
  modified_base 35: mod_base = OTHER; note = 2'-O-Methyl-adenosine
  modified_base 36: mod_base = OTHER; note = 2'-O-Methyl-adenosine
  modified_base 37: mod_base = OTHER; note = 2'-O-Methyl-uridine
  modified_base 38: mod_base = OTHER; note = 2'-O-Methyl-adenosine
  modified_base 39: mod_base = OTHER; note = 2'-O-Methyl-guanosine
  modified_base 40: mod_base = OTHER; note = 2'-O-Methyl-cytidine
  modified_base 41: mod_base = OTHER; note = 2'-O-Methyl-adenosine
  modified_base 42: mod_base = OTHER; note = 2'-O-Methyl-adenosine
  modified_base 45: mod_base = OTHER; note = uridine phosphorothioate
  modified_base 46: mod_base = OTHER; note = 2'-O-Methyl-adenosine
  modified_base 48: mod_base = OTHER; note = 2'-O-Methyl-adenosine
  modified_base 50: mod_base = OTHER; note = 2'-O-Methyl-uridine
  modified_base 52: mod_base = OTHER; note = 2'-O-Methyl-adenosine
  modified_base 53: mod_base = OTHER; note = 2'-O-Methyl-guanosine
  modified_base 54: mod_base = OTHER; note = 2'-O-Methyl-guanosine
  modified_base 57: mod_base = OTHER; note = 2'-O-Methyl-adenosine
  modified_base 61: mod_base = OTHER; note = 2'-O-Methyl-cytidine
  modified_base 64: mod_base = OTHER; note = uridine phosphorothioate
  modified_base 66: mod_base = OTHER; note = 2'-O-Methyl-uridine
  modified_base 67: mod_base = OTHER; note = 2'-O-Methyl-cytidine
  modified_base 70: mod_base = OTHER; note = 2'-O-Methyl-cytidine
  modified_base 71: mod_base = OTHER; note = 2'-O-Methyl-uridine
  modified_base 72: mod_base = OTHER; note = 2'-O-Methyl-uridine
  modified_base 74: mod_base = OTHER; note = 2'-O-Methyl-adenosine
  modified_base 75: mod_base = OTHER; note = 2'-O-Methyl-adenosine
  modified_base 76: mod_base = OTHER; note = 2'-O-Methyl-adenosine
  modified_base 77: mod_base = OTHER; note = 2'-O-Methyl-adenosine
  modified_base 78: mod_base = OTHER; note = 2'-O-Methyl-adenosine
  modified_base 79: mod_base = OTHER; note = 2'-O-Methyl-guanosine
  modified_base 80: mod_base = OTHER; note = 2'-O-Methyl-uridine
  modified_base 82: mod_base = OTHER; note = 2'-O-Methyl-guanosine
  modified_base 83: mod_base = OTHER; note = 2'-O-Methyl-cytidine
  modified_base 84: mod_base = OTHER; note = 2'-O-Methyl-adenosine
  modified_base 85: mod_base = OTHER; note = 2'-O-Methyl-cytidine
  modified_base 86: mod_base = OTHER; note = 2'-O-Methyl-cytidine
  modified_base 87: mod_base = OTHER; note = 2'-O-Methyl-guanosine
  modified_base 89: mod_base = OTHER; note = 2'-O-Methyl-guanosine
  modified_base 92: mod_base = OTHER; note = 2'-O-Methyl-guanosine
  modified_base 93: mod_base = OTHER; note = 2'-O-Methyl-guanosine
  modified_base 94: mod_base = OTHER; note = 2'-O-Methyl-uridine
  modified_base 95: mod_base = OTHER; note = 2'-O-Methyl-guanosine
  modified_base 96: mod_base = OTHER; note = 2'-O-Methyl-cytidine
  modified_base 97: mod_base = OTHER; note = 2'-O-Methyl-uridine
  modified_base 98: mod_base = OTHER; note = 2'-O-Methyl-uridine phosphorothioate
  modified_base 99: mod_base = OTHER; note = 2'-O-Methyl-uridine phosphorothioate
  modified_base 100: mod_base = OTHER; note = 2'-O-Methyl-uridine

SEQ ID NO: 2721 - RNA, 103 nt, synthetic construct; identical to SEQ ID NO: 1700
  source 1..103: mol_type = other RNA
  modified_base 1: mod_base = OTHER; note = 2'-O-Methyl-cytidine phosphorothioate
  modified_base 2: mod_base = OTHER; note = 2'-O-Methyl-adenosine phosphorothioate
  modified_base 3: mod_base = OTHER; note = 2'-O-Methyl-guanosine
  modified_base 21: mod_base = OTHER; note = 2'-O-Methyl-guanosine
  modified_base 28: mod_base = OTHER; note = 2'-O-Methyl-adenosine
  modified_base 29: mod_base = OTHER; note = 2'-O-Methyl-guanosine
  modified_base 30: mod_base = OTHER; note = 2'-O-Methyl-cytidine
  modified_base 31: mod_base = OTHER; note = 2'-O-Methyl-uridine
  modified_base 32: mod_base = OTHER; note = 2'-O-Methyl-adenosine
  modified_base 33: mod_base = OTHER; note = 2'-O-Methyl-guanosine
  modified_base 34: mod_base = OTHER; note = 2'-O-Methyl-adenosine
  modified_base 35: mod_base = OTHER; note = 2'-O-Methyl-adenosine
  modified_base 36: mod_base = OTHER; note = 2'-O-Methyl-adenosine
  modified_base 37: mod_base = OTHER; note = 2'-O-Methyl-uridine
  modified_base 38: mod_base = OTHER; note = 2'-O-Methyl-adenosine
  modified_base 39: mod_base = OTHER; note = 2'-O-Methyl-guanosine
  modified_base 40: mod_base = OTHER; note = 2'-O-Methyl-cytidine
  modified_base 41: mod_base = OTHER; note = 2'-O-Methyl-adenosine
  modified_base 42: mod_base = OTHER; note = 2'-O-Methyl-adenosine
  modified_base 45: mod_base = OTHER; note = uridine phosphorothioate
  modified_base 46: mod_base = OTHER; note = 2'-O-Methyl-adenosine
  modified_base 48: mod_base = OTHER; note = 2'-O-Methyl-adenosine
  modified_base 50: mod_base = OTHER; note = 2'-O-Methyl-uridine
  modified_base 52: mod_base = OTHER; note = 2'-O-Methyl-adenosine
  modified_base 53: mod_base = OTHER; note = 2'-O-Methyl-guanosine
  modified_base 54: mod_base = OTHER; note = 2'-O-Methyl-guanosine
  modified_base 55: mod_base = OTHER; note = 2'-O-Methyl-cytidine
  modified_base 56: mod_base = OTHER; note = 2'-O-Methyl-uridine
  modified_base 57: mod_base = OTHER; note = 2'-O-Methyl-adenosine
  modified_base 60: mod_base = OTHER; note = 2'-O-Methyl-cytidine
  modified_base 61: mod_base = OTHER; note = 2'-O-Methyl-cytidine
  modified_base 64: mod_base = OTHER; note = uridine phosphorothioate
  modified_base 66: mod_base = OTHER; note = 2'-O-Methyl-uridine
  modified_base 67: mod_base = OTHER; note = 2'-O-Methyl-cytidine
  modified_base 70: mod_base = OTHER; note = 2'-O-Methyl-cytidine
  modified_base 71: mod_base = OTHER; note = 2'-O-Methyl-uridine
  modified_base 72: mod_base = OTHER; note = 2'-O-Methyl-uridine
  modified_base 74: mod_base = OTHER; note = 2'-O-Methyl-adenosine
  modified_base 75: mod_base = OTHER; note = 2'-O-Methyl-adenosine
  modified_base 76: mod_base = OTHER; note = 2'-O-Methyl-adenosine
  modified_base 77: mod_base = OTHER; note = 2'-O-Methyl-adenosine
  modified_base 78: mod_base = OTHER; note = 2'-O-Methyl-adenosine
  modified_base 79: mod_base = OTHER; note = 2'-O-Methyl-guanosine
  modified_base 80: mod_base = OTHER; note = 2'-O-Methyl-uridine
  modified_base 82: mod_base = OTHER; note = 2'-O-Methyl-guanosine
  modified_base 83: mod_base = OTHER; note = 2'-O-Methyl-cytidine
  modified_base 84: mod_base = OTHER; note = 2'-O-Methyl-adenosine
  modified_base 85: mod_base = OTHER; note = 2'-O-Methyl-cytidine
  modified_base 86: mod_base = OTHER; note = 2'-O-Methyl-cytidine
  modified_base 87: mod_base = OTHER; note = 2'-O-Methyl-guanosine
  modified_base 89: mod_base = OTHER; note = 2'-O-Methyl-guanosine
  modified_base 92: mod_base = OTHER; note = 2'-O-Methyl-guanosine
  modified_base 93: mod_base = OTHER; note = 2'-O-Methyl-guanosine
  modified_base 94: mod_base = OTHER; note = 2'-O-Methyl-uridine
  modified_base 95: mod_base = OTHER; note = 2'-O-Methyl-guanosine
  modified_base 96: mod_base = OTHER; note = 2'-O-Methyl-cytidine
  modified_base 97: mod_base = OTHER; note = 2'-O-Methyl-uridine
  modified_base 98: mod_base = OTHER; note = 2'-O-Methyl-uridine phosphorothioate
  modified_base 99: mod_base = OTHER; note = 2'-O-Methyl-uridine phosphorothioate
  modified_base 100: mod_base = OTHER; note = 2'-O-Methyl-uridine

SEQ ID NO: 2722 - RNA, 103 nt, synthetic construct; identical to SEQ ID NO: 1700
  source 1..103: mol_type = other RNA
  modified_base 1: mod_base = OTHER; note = 2'-O-Methyl-cytidine phosphorothioate
  modified_base 2: mod_base = OTHER; note = 2'-O-Methyl-adenosine phosphorothioate
  modified_base 3: mod_base = OTHER; note = 2'-O-Methyl-guanosine
  modified_base 21: mod_base = OTHER; note = 2'-O-Methyl-guanosine
  modified_base 28: mod_base = OTHER; note = 2'-O-Methyl-adenosine
  modified_base 29: mod_base = OTHER; note = 2'-O-Methyl-guanosine
  modified_base 30: mod_base = OTHER; note = 2'-O-Methyl-cytidine
  modified_base 31: mod_base = OTHER; note = 2'-O-Methyl-uridine
  modified_base 32: mod_base = OTHER; note = 2'-O-Methyl-adenosine
  modified_base 33: mod_base = OTHER; note = 2'-O-Methyl-guanosine
  modified_base 34: mod_base = OTHER; note = 2'-O-Methyl-adenosine
  modified_base 35: mod_base = OTHER; note = 2'-O-Methyl-adenosine
  modified_base 36: mod_base = OTHER; note = 2'-O-Methyl-adenosine
  modified_base 37: mod_base = OTHER; note = 2'-O-Methyl-uridine
  modified_base 38: mod_base = OTHER; note = 2'-O-Methyl-adenosine
  modified_base 39: mod_base = OTHER; note = 2'-O-Methyl-guanosine
  modified_base 40: mod_base = OTHER; note = 2'-O-Methyl-cytidine
  modified_base 41: mod_base = OTHER; note = 2'-O-Methyl-adenosine
  modified_base 42: mod_base = OTHER; note = 2'-O-Methyl-adenosine
  modified_base 45: mod_base = OTHER; note = uridine phosphorothioate
  modified_base 46: mod_base = OTHER; note = 2'-O-Methyl-adenosine
  modified_base 48: mod_base = OTHER; note = 2'-O-Methyl-adenosine
  modified_base 50: mod_base = OTHER; note = 2'-O-Methyl-uridine
  modified_base 52: mod_base = OTHER; note = 2'-O-Methyl-adenosine
  modified_base 53: mod_base = OTHER; note = 2'-O-Methyl-guanosine
  modified_base 54: mod_base = OTHER; note = 2'-O-Methyl-guanosine
  modified_base 57: mod_base = OTHER; note = 2'-O-Methyl-adenosine
  modified_base 61: mod_base = OTHER; note = 2'-O-Methyl-cytidine
  modified_base 64: mod_base = OTHER; note = uridine phosphorothioate
  modified_base 66: mod_base = OTHER; note = 2'-O-Methyl-uridine
  modified_base 67: mod_base = OTHER; note = 2'-O-Methyl-cytidine
  modified_base 70: mod_base = OTHER; note = 2'-O-Methyl-cytidine
  modified_base 71: mod_base = OTHER; note = 2'-O-Methyl-uridine
  modified_base 72: mod_base = OTHER; note = 2'-O-Methyl-uridine
  modified_base 73: mod_base = OTHER; note = 2'-O-Methyl-guanosine
  modified_base 74: mod_base = OTHER; note = 2'-O-Methyl-adenosine
  modified_base 75: mod_base = OTHER; note = 2'-O-Methyl-adenosine
  modified_base 76: mod_base = OTHER; note = 2'-O-Methyl-adenosine
  modified_base 77: mod_base = OTHER; note = 2'-O-Methyl-adenosine
  modified_base 78: mod_base = OTHER; note = 2'-O-Methyl-adenosine
  modified_base 79: mod_base = OTHER; note = 2'-O-Methyl-guanosine
  modified_base 80: mod_base = OTHER; note = 2'-O-Methyl-uridine
  modified_base 82: mod_base = OTHER; note = 2'-O-Methyl-guanosine
  modified_base 83: mod_base = OTHER; note = 2'-O-Methyl-cytidine
  modified_base 84: mod_base = OTHER; note = 2'-O-Methyl-adenosine
  modified_base 85: mod_base = OTHER; note = 2'-O-Methyl-cytidine
  modified_base 86: mod_base = OTHER; note = 2'-O-Methyl-cytidine
  modified_base 87: mod_base = OTHER; note = 2'-O-Methyl-guanosine
  modified_base 89: mod_base = OTHER; note = 2'-O-Methyl-guanosine
  modified_base 92: mod_base = OTHER; note = 2'-O-Methyl-guanosine
  modified_base 93: mod_base = OTHER; note = 2'-O-Methyl-guanosine
  modified_base 94: mod_base = OTHER; note = 2'-O-Methyl-uridine
  modified_base 95: mod_base = OTHER; note = 2'-O-Methyl-guanosine
  modified_base 96: mod_base = OTHER; note = 2'-O-Methyl-cytidine
  modified_base 97: mod_base = OTHER; note = 2'-O-Methyl-uridine
  modified_base 98: mod_base = OTHER; note = 2'-O-Methyl-uridine phosphorothioate
  modified_base 99: mod_base = OTHER; note = 2'-O-Methyl-uridine phosphorothioate
  modified_base 100: mod_base = OTHER; note = 2'-O-Methyl-uridine

SEQ ID NO: 2723 - RNA, 103 nt, synthetic construct; identical to SEQ ID NO: 1700
  source 1..103: mol_type = other RNA
  modified_base 1: mod_base = OTHER; note = 2'-O-Methyl-cytidine phosphorothioate
  modified_base 2: mod_base = OTHER; note = 2'-O-Methyl-adenosine phosphorothioate
  modified_base 3: mod_base = OTHER; note = 2'-O-Methyl-guanosine
  modified_base 21: mod_base = OTHER; note = 2'-O-Methyl-guanosine
  modified_base 28: mod_base = OTHER; note = 2'-O-Methyl-adenosine
  modified_base 29: mod_base = OTHER; note = 2'-O-Methyl-guanosine
  modified_base 30: mod_base = OTHER; note = 2'-O-Methyl-cytidine
  modified_base 31: mod_base = OTHER; note = 2'-O-Methyl-uridine
  modified_base 32: mod_base = OTHER; note = 2'-O-Methyl-adenosine
  modified_base 34: mod_base = OTHER; note = 2'-O-Methyl-adenosine
  modified_base 35: mod_base = OTHER; note = 2'-O-Methyl-adenosine
  modified_base 36: mod_base = OTHER; note = 2'-O-Methyl-adenosine
  modified_base 37: mod_base = OTHER; note = 2'-O-Methyl-uridine
  modified_base 38: mod_base = OTHER; note = 2'-O-Methyl-adenosine
  modified_base 39: mod_base = OTHER; note = 2'-O-Methyl-guanosine
  modified_base 40: mod_base = OTHER; note = 2'-O-Methyl-cytidine
  modified_base 41: mod_base = OTHER; note = 2'-O-Methyl-adenosine
  modified_base 42: mod_base = OTHER; note = 2'-O-Methyl-adenosine
  modified_base 45: mod_base = OTHER; note = uridine phosphorothioate
  modified_base 46: mod_base = OTHER; note = 2'-O-Methyl-adenosine
  modified_base 48: mod_base = OTHER; note = 2'-O-Methyl-adenosine
  modified_base 50: mod_base = OTHER; note = 2'-O-Methyl-uridine
  modified_base 52: mod_base = OTHER; note = 2'-O-Methyl-adenosine
  modified_base 53: mod_base = OTHER; note = 2'-O-Methyl-guanosine
  modified_base 54: mod_base = OTHER; note = 2'-O-Methyl-guanosine
  modified_base 57: mod_base = OTHER; note = 2'-O-Methyl-adenosine
  modified_base 61: mod_base = OTHER; note = 2'-O-Methyl-cytidine
  modified_base 64: mod_base = OTHER; note = uridine phosphorothioate
  modified_base 66: mod_base = OTHER; note = 2'-O-Methyl-uridine
  modified_base 67: mod_base = OTHER; note = 2'-O-Methyl-cytidine
  modified_base 70: mod_base = OTHER; note = 2'-O-Methyl-cytidine
  modified_base 71: mod_base = OTHER; note = 2'-O-Methyl-uridine
  modified_base 72: mod_base = OTHER; note = 2'-O-Methyl-uridine
  modified_base 73: mod_base = OTHER; note = 2'-O-Methyl-guanosine
  modified_base 74: mod_base = OTHER; note = 2'-O-Methyl-adenosine
  modified_base 75: mod_base = OTHER; note = 2'-O-Methyl-adenosine
  modified_base 76: mod_base = OTHER; note = 2'-O-Methyl-adenosine
  modified_base 77: mod_base = OTHER; note = 2'-O-Methyl-adenosine
  modified_base 78: mod_base = OTHER; note = 2'-O-Methyl-adenosine
  modified_base 79: mod_base = OTHER; note = 2'-O-Methyl-guanosine
  modified_base 80: mod_base = OTHER; note = 2'-O-Methyl-uridine
  modified_base 82: mod_base = OTHER; note = 2'-O-Methyl-guanosine
  modified_base 83: mod_base = OTHER; note = 2'-O-Methyl-cytidine
  modified_base 84: mod_base = OTHER; note = 2'-O-Methyl-adenosine
  modified_base 85: mod_base = OTHER; note = 2'-O-Methyl-cytidine
  modified_base 86: mod_base = OTHER; note = 2'-O-Methyl-cytidine
  modified_base 87: mod_base = OTHER; note = 2'-O-Methyl-guanosine
  modified_base 89: mod_base = OTHER; note = 2'-O-Methyl-guanosine
  modified_base 92: mod_base = OTHER; note = 2'-O-Methyl-guanosine
  modified_base 93: mod_base = OTHER; note = 2'-O-Methyl-guanosine
  modified_base 94: mod_base = OTHER; note = 2'-O-Methyl-uridine
  modified_base 95: mod_base = OTHER; note = 2'-O-Methyl-guanosine
  modified_base 96: mod_base = OTHER; note = 2'-O-Methyl-cytidine
  modified_base 97: mod_base = OTHER; note = 2'-O-Methyl-uridine
  modified_base 98: mod_base = OTHER; note = 2'-O-Methyl-uridine phosphorothioate
  modified_base 99: mod_base = OTHER; note = 2'-O-Methyl-uridine phosphorothioate
  modified_base 100: mod_base = OTHER; note = 2'-O-Methyl-uridine

SEQ ID NO: 2724 - RNA, 103 nt, synthetic construct; identical to SEQ ID NO: 1700
  source 1..103: mol_type = other RNA
  modified_base 1: mod_base = OTHER; note = 2'-O-Methyl-cytidine phosphorothioate
  modified_base 2: mod_base = OTHER; note = 2'-O-Methyl-adenosine phosphorothioate
  modified_base 3: mod_base = OTHER; note = 2'-O-Methyl-guanosine
  modified_base 21: mod_base = OTHER; note = 2'-O-Methyl-guanosine
  modified_base 28: mod_base = OTHER; note = 2'-O-Methyl-adenosine
  modified_base 29: mod_base = OTHER; note = 2'-O-Methyl-guanosine
  modified_base 30: mod_base = OTHER; note = 2'-O-Methyl-cytidine
  modified_base 31: mod_base = OTHER; note = 2'-O-Methyl-uridine
  modified_base 32: mod_base = OTHER; note = 2'-O-Methyl-adenosine
  modified_base 34: mod_base = OTHER; note = 2'-O-Methyl-adenosine
  modified_base 35: mod_base = OTHER; note = 2'-O-Methyl-adenosine
  modified_base 36: mod_base = OTHER; note = 2'-O-Methyl-adenosine
  modified_base 37: mod_base = OTHER; note = 2'-O-Methyl-uridine
  modified_base 38: mod_base = OTHER; note = 2'-O-Methyl-adenosine
  modified_base 39: mod_base = OTHER; note = 2'-O-Methyl-guanosine
  modified_base 40: mod_base = OTHER; note = 2'-O-Methyl-cytidine
  modified_base 41: mod_base = OTHER; note = 2'-O-Methyl-adenosine
  modified_base 42: mod_base = OTHER; note = 2'-O-Methyl-adenosine
  modified_base 45: mod_base = OTHER; note = uridine phosphorothioate
  modified_base 46: mod_base = OTHER; note = 2'-O-Methyl-adenosine
  modified_base 48: mod_base = OTHER; note = 2'-O-Methyl-adenosine
  modified_base 50: mod_base = OTHER; note = 2'-O-Methyl-uridine
  modified_base 52: mod_base = OTHER; note = 2'-O-Methyl-adenosine
  modified_base 53: mod_base = OTHER; note = 2'-O-Methyl-guanosine
  modified_base 54: mod_base = OTHER; note = 2'-O-Methyl-guanosine
  modified_base 57: mod_base = OTHER; note = 2'-O-Methyl-adenosine
  modified_base 61: mod_base = OTHER; note = 2'-O-Methyl-cytidine
  modified_base 64: mod_base = OTHER; note = uridine phosphorothioate
  modified_base 66: mod_base = OTHER; note = 2'-O-Methyl-uridine
  modified_base 67: mod_base = OTHER; note = 2'-O-Methyl-cytidine
  modified_base 70: mod_base = OTHER; note = 2'-O-Methyl-cytidine
  modified_base 71: mod_base = OTHER; note = 2'-O-Methyl-uridine
  modified_base 72: mod_base = OTHER; note = 2'-O-Methyl-uridine
  modified_base 73: mod_base = OTHER; note = 2'-O-Methyl-guanosine
  modified_base 74: mod_base = OTHER; note = 2'-O-Methyl-adenosine
  modified_base 75: mod_base = OTHER; note = 2'-O-Methyl-adenosine
  modified_base 76: mod_base = OTHER; note = 2'-O-Methyl-adenosine
  modified_base 77: mod_base = OTHER; note = 2'-O-Methyl-adenosine
  modified_base 78: mod_base = OTHER; note = 2'-O-Methyl-adenosine
  modified_base 79: mod_base = OTHER; note = 2'-O-Methyl-guanosine
  modified_base 80: mod_base = OTHER; note = 2'-O-Methyl-uridine
  modified_base 82: mod_base = OTHER; note = 2'-O-Methyl-guanosine
  modified_base 83: mod_base = OTHER; note = 2'-O-Methyl-cytidine
  modified_base 84: mod_base = OTHER; note = 2'-O-Methyl-adenosine
  modified_base 85: mod_base = OTHER; note = 2'-O-Methyl-cytidine
  modified_base 86: mod_base = OTHER; note = 2'-O-Methyl-cytidine
  modified_base 87: mod_base = OTHER; note = 2'-O-Methyl-guanosine
  modified_base 89: mod_base = OTHER; note = 2'-O-Methyl-guanosine
  modified_base 91: mod_base = OTHER; note = 2'-O-Methyl-cytidine
  modified_base 92: mod_base = OTHER; note = 2'-O-Methyl-guanosine
  modified_base 93: mod_base = OTHER; note = 2'-O-Methyl-guanosine
  modified_base 94: mod_base = OTHER; note = 2'-O-Methyl-uridine
  modified_base 95: mod_base = OTHER; note = 2'-O-Methyl-guanosine
  modified_base 96: mod_base = OTHER; note = 2'-O-Methyl-cytidine
  modified_base 97: mod_base = OTHER; note = 2'-O-Methyl-uridine
  modified_base 98: mod_base = OTHER; note = 2'-O-Methyl-uridine phosphorothioate
  modified_base 99: mod_base = OTHER; note = 2'-O-Methyl-uridine phosphorothioate
  modified_base 100: mod_base = OTHER; note = 2'-O-Methyl-uridine

SEQ ID NO: 2725 - RNA, 103 nt, synthetic construct; identical to SEQ ID NO: 1700
  source 1..103: mol_type = other RNA
  modified_base 1: mod_base = OTHER; note = 2'-O-Methyl-cytidine phosphorothioate
  modified_base 2: mod_base = OTHER; note = 2'-O-Methyl-adenosine phosphorothioate
  modified_base 3: mod_base = OTHER; note = 2'-O-Methyl-guanosine
  modified_base 21: mod_base = OTHER; note = 2'-O-Methyl-guanosine
  modified_base 28: mod_base = OTHER; note = 2'-O-Methyl-adenosine
  modified_base 29: mod_base = OTHER; note = 2'-O-Methyl-guanosine
  modified_base 30: mod_base = OTHER; note = 2'-O-Methyl-cytidine
  modified_base 31: mod_base = OTHER; note = 2'-O-Methyl-uridine
  modified_base 32: mod_base = OTHER; note = 2'-O-Methyl-adenosine
  modified_base 34: mod_base = OTHER; note = 2'-O-Methyl-adenosine
  modified_base 35: mod_base = OTHER; note = 2'-O-Methyl-adenosine
  modified_base 36: mod_base = OTHER; note = 2'-O-Methyl-adenosine
  modified_base 37: mod_base = OTHER; note = 2'-O-Methyl-uridine
  modified_base 38: mod_base = OTHER; note = 2'-O-Methyl-adenosine
  modified_base 39: mod_base = OTHER; note = 2'-O-Methyl-guanosine
  modified_base 40: mod_base = OTHER; note = 2'-O-Methyl-cytidine
  modified_base 41: mod_base = OTHER; note = 2'-O-Methyl-adenosine
  modified_base 42: mod_base = OTHER; note = 2'-O-Methyl-adenosine
  modified_base 45: mod_base = OTHER; note = uridine phosphorothioate
  modified_base 46: mod_base = OTHER; note = 2'-O-Methyl-adenosine
  modified_base 48: mod_base = OTHER; note = 2'-O-Methyl-adenosine
  modified_base 50: mod_base = OTHER; note = 2'-O-Methyl-uridine
  modified_base 52: mod_base = OTHER; note = 2'-O-Methyl-adenosine
  modified_base 53: mod_base = OTHER; note = 2'-O-Methyl-guanosine
  modified_base 54: mod_base = OTHER; note = 2'-O-Methyl-guanosine
  modified_base 55: mod_base = OTHER; note = 2'-O-Methyl-cytidine
  modified_base 56: mod_base = OTHER; note = 2'-O-Methyl-uridine
  modified_base 57: mod_base = OTHER; note = 2'-O-Methyl-adenosine
  modified_base 60: mod_base = OTHER; note = 2'-O-Methyl-cytidine
  modified_base 61: mod_base = OTHER; note = 2'-O-Methyl-cytidine
  modified_base 64: mod_base = OTHER; note = uridine phosphorothioate
  modified_base 66: mod_base = OTHER; note = 2'-O-Methyl-uridine
  modified_base 67: mod_base = OTHER; note = 2'-O-Methyl-cytidine
  modified_base 70: mod_base = OTHER; note = 2'-O-Methyl-cytidine
  modified_base 71: mod_base = OTHER; note = 2'-O-Methyl-uridine
  modified_base 72: mod_base = OTHER; note = 2'-O-Methyl-uridine
  modified_base 74: mod_base = OTHER; note = 2'-O-Methyl-adenosine
  modified_base 75: mod_base = OTHER; note = 2'-O-Methyl-adenosine
  modified_base 76: mod_base = OTHER; note = 2'-O-Methyl-adenosine
  modified_base 77: mod_base = OTHER; note = 2'-O-Methyl-adenosine
  modified_base 78: mod_base = OTHER; note = 2'-O-Methyl-adenosine
  modified_base 79: mod_base = OTHER; note = 2'-O-Methyl-guanosine
  modified_base 80: mod_base = OTHER; note = 2'-O-Methyl-uridine
  modified_base 82: mod_base = OTHER; note = 2'-O-Methyl-guanosine
  modified_base 83: mod_base = OTHER; note = 2'-O-Methyl-cytidine
  modified_base 84: mod_base = OTHER; note = 2'-O-Methyl-adenosine
  modified_base 85: mod_base = OTHER; note = 2'-O-Methyl-cytidine
  modified_base 86: mod_base = OTHER; note = 2'-O-Methyl-cytidine
  modified_base 87: mod_base = OTHER; note = 2'-O-Methyl-guanosine
  modified_base 89: mod_base = OTHER; note = 2'-O-Methyl-guanosine
  modified_base 92: mod_base = OTHER; note = 2'-O-Methyl-guanosine
  modified_base 93: mod_base = OTHER; note = 2'-O-Methyl-guanosine
  modified_base 94: mod_base = OTHER; note = 2'-O-Methyl-uridine
  modified_base 95: mod_base = OTHER; note = 2'-O-Methyl-guanosine
  modified_base 96: mod_base = OTHER; note = 2'-O-Methyl-cytidine
  modified_base 97: mod_base = OTHER; note = 2'-O-Methyl-uridine
  modified_base 98: mod_base = OTHER; note = 2'-O-Methyl-uridine phosphorothioate
  modified_base 99: mod_base = OTHER; note = 2'-O-Methyl-uridine phosphorothioate
  modified_base 100: mod_base = OTHER; note = 2'-O-Methyl-uridine

SEQ ID NO: 2726 - RNA, 103 nt, synthetic construct; identical to SEQ ID NO: 1643
  source 1..103: mol_type = other RNA
  modified_base 1: mod_base = OTHER; note = 2'-O-Methyl-cytidine phosphorothioate
  modified_base 2: mod_base = OTHER; note = 2'-O-Methyl-cytidine phosphorothioate
  modified_base 3: mod_base = OTHER; note = 2'-O-Methyl-cytidine
  modified_base 21: mod_base = OTHER; note = 2'-O-Methyl-guanosine
  modified_base 25: mod_base = OTHER; note = uridine phosphorothioate
  modified_base 28: mod_base = OTHER; note = 2'-O-Methyl-adenosine
  modified_base 29: mod_base = OTHER; note = 2'-O-Methyl-guanosine
  modified_base 30: mod_base = OTHER; note = 2'-O-Methyl-cytidine
  modified_base 31: mod_base = OTHER; note = 2'-O-Methyl-uridine
  modified_base 32: mod_base = OTHER; note = 2'-O-Methyl-adenosine
  modified_base 33: mod_base = OTHER; note = 2'-O-Methyl-guanosine
  modified_base 34: mod_base = OTHER; note = 2'-O-Methyl-adenosine
  modified_base 35: mod_base = OTHER; note = 2'-O-Methyl-adenosine
  modified_base 36: mod_base = OTHER; note = 2'-O-Methyl-adenosine
  modified_base 37: mod_base = OTHER; note = 2'-O-Methyl-uridine
  modified_base 38: mod_base = OTHER; note = 2'-O-Methyl-adenosine
  modified_base 39: mod_base = OTHER; note = 2'-O-Methyl-guanosine
  modified_base 40: mod_base = OTHER; note = 2'-O-Methyl-cytidine
  modified_base 41: mod_base = OTHER; note = 2'-O-Methyl-adenosine
  modified_base 42: mod_base = OTHER; note = 2'-O-Methyl-adenosine
  modified_base 45: mod_base = OTHER; note = uridine phosphorothioate
  modified_base 46: mod_base = OTHER; note = 2'-O-Methyl-adenosine
  modified_base 48: mod_base = OTHER; note = 2'-O-Methyl-adenosine
  modified_base 50: mod_base = OTHER; note = 2'-O-Methyl-uridine
  modified_base 52: mod_base = OTHER; note = 2'-O-Methyl-adenosine
  modified_base 53: mod_base = OTHER; note = 2'-O-Methyl-guanosine
  modified_base 54: mod_base = OTHER; note = 2'-O-Methyl-guanosine
  modified_base 55: mod_base = OTHER; note = 2'-O-Methyl-cytidine
  modified_base 56: mod_base = OTHER; note = 2'-O-Methyl-uridine
  modified_base 57: mod_base = OTHER; note = 2'-O-Methyl-adenosine
  modified_base 60: mod_base = OTHER; note = 2'-O-Methyl-cytidine
  modified_base 61: mod_base = OTHER; note = 2'-O-Methyl-cytidine
  modified_base 66: mod_base = OTHER; note = 2'-O-Methyl-uridine
  modified_base 67: mod_base = OTHER; note = 2'-O-Methyl-cytidine
  modified_base 70: mod_base = OTHER; note = 2'-O-Methyl-cytidine
  modified_base 71: mod_base = OTHER; note = 2'-O-Methyl-uridine
  modified_base 72: mod_base = OTHER; note = 2'-O-Methyl-uridine
  modified_base 73: mod_base = OTHER; note = 2'-O-Methyl-guanosine
  modified_base 74: mod_base = OTHER; note = 2'-O-Methyl-adenosine
  modified_base 75: mod_base = OTHER; note = 2'-O-Methyl-adenosine
  modified_base 76: mod_base = OTHER; note = 2'-O-Methyl-adenosine
  modified_base 77: mod_base = OTHER; note = 2'-O-Methyl-adenosine
  modified_base 78: mod_base = OTHER; note = 2'-O-Methyl-adenosine
  modified_base 79: mod_base = OTHER; note = 2'-O-Methyl-guanosine
  modified_base 80: mod_base = OTHER; note = 2'-O-Methyl-uridine
  modified_base 81: mod_base = OTHER; note = 2'-O-Methyl-guanosine
  modified_base 83: mod_base = OTHER; note = 2'-O-Methyl-cytidine
  modified_base 84: mod_base = OTHER; note = 2'-O-Methyl-adenosine
  modified_base 85: mod_base = OTHER; note = 2'-O-Methyl-cytidine
  modified_base 86: mod_base = OTHER; note = 2'-O-Methyl-cytidine
  modified_base 87: mod_base = OTHER; note = 2'-O-Methyl-guanosine
  modified_base 88: mod_base = OTHER; note = 2'-O-Methyl-adenosine
  modified_base 89: mod_base = OTHER; note = 2'-O-Methyl-guanosine
  modified_base 90: mod_base = OTHER; note = 2'-O-Methyl-uridine
  modified_base 91: mod_base = OTHER; note = 2'-O-Methyl-cytidine
  modified_base 92: mod_base = OTHER; note = 2'-O-Methyl-guanosine
  modified_base 93: mod_base = OTHER; note = 2'-O-Methyl-guanosine
  modified_base 94: mod_base = OTHER; note = 2'-O-Methyl-uridine
  modified_base 95: mod_base = OTHER; note = 2'-O-Methyl-guanosine
  modified_base 96: mod_base = OTHER; note = 2'-O-Methyl-cytidine
  modified_base 97: mod_base = OTHER; note = 2'-O-Methyl-uridine
  modified_base 98: mod_base = OTHER; note = 2'-O-Methyl-uridine phosphorothioate
  modified_base 99: mod_base = OTHER; note = 2'-O-Methyl-uridine phosphorothioate
  modified_base 100: mod_base = OTHER; note = 2'-O-Methyl-uridine

SEQ ID NO: 2727 - RNA, 103 nt, synthetic construct; identical to SEQ ID NO: 1643
  source 1..103: mol_type = other RNA
  modified_base 1: mod_base = OTHER; note = 2'-O-Methyl-cytidine phosphorothioate
  modified_base 2: mod_base = OTHER; note = 2'-O-Methyl-cytidine phosphorothioate
  modified_base 3: mod_base = OTHER; note = 2'-O-Methyl-cytidine
  modified_base 21: mod_base = OTHER; note = 2'-O-Methyl-guanosine
  modified_base 25: mod_base = OTHER; note = uridine phosphorothioate
  modified_base 28: mod_base = OTHER; note = 2'-O-Methyl-adenosine
  modified_base 29: mod_base = OTHER; note = 2'-O-Methyl-guanosine
  modified_base 30: mod_base = OTHER; note = 2'-O-Methyl-cytidine
  modified_base 31: mod_base = OTHER; note = 2'-O-Methyl-uridine
  modified_base 32: mod_base = OTHER; note = 2'-O-Methyl-adenosine
  modified_base 34: mod_base = OTHER; note = 2'-O-Methyl-adenosine
  modified_base 35: mod_base = OTHER; note = 2'-O-Methyl-adenosine
  modified_base 36: mod_base = OTHER; note = 2'-O-Methyl-adenosine
  modified_base 37: mod_base = OTHER; note = 2'-O-Methyl-uridine
  modified_base 38: mod_base = OTHER; note = 2'-O-Methyl-adenosine
  modified_base 39: mod_base = OTHER; note = 2'-O-Methyl-guanosine
  modified_base 40: mod_base = OTHER; note = 2'-O-Methyl-cytidine
  modified_base 41: mod_base = OTHER; note = 2'-O-Methyl-adenosine
  modified_base 42: mod_base = OTHER; note = 2'-O-Methyl-adenosine
  modified_base 45: mod_base = OTHER; note = uridine phosphorothioate
  modified_base 46: mod_base = OTHER; note = 2'-O-Methyl-adenosine
  modified_base 48: mod_base = OTHER; note = 2'-O-Methyl-adenosine
  modified_base 50: mod_base = OTHER; note = 2'-O-Methyl-uridine
  modified_base 52: mod_base = OTHER; note = 2'-O-Methyl-adenosine
  modified_base 53: mod_base = OTHER; note = 2'-O-Methyl-guanosine
  modified_base 54: mod_base = OTHER; note = 2'-O-Methyl-guanosine
  modified_base 55: mod_base = OTHER; note = 2'-O-Methyl-cytidine
  modified_base 56: mod_base = OTHER; note = 2'-O-Methyl-uridine
  modified_base 57: mod_base = OTHER; note = 2'-O-Methyl-adenosine
  modified_base 60: mod_base = OTHER; note = 2'-O-Methyl-cytidine
  modified_base 61: mod_base = OTHER; note = 2'-O-Methyl-cytidine
  modified_base 66: mod_base = OTHER; note = 2'-O-Methyl-uridine
  modified_base 67: mod_base = OTHER; note = 2'-O-Methyl-cytidine
  modified_base 70: mod_base = OTHER; note = 2'-O-Methyl-cytidine
  modified_base 71: mod_base = OTHER; note = 2'-O-Methyl-uridine
  modified_base 72: mod_base = OTHER; note = 2'-O-Methyl-uridine
  modified_base 74: mod_base = OTHER; note = 2'-O-Methyl-adenosine
  modified_base 75: mod_base = OTHER; note = 2'-O-Methyl-adenosine
  modified_base 76: mod_base = OTHER; note = 2'-O-Methyl-adenosine
  modified_base 77: mod_base = OTHER; note = 2'-O-Methyl-adenosine
  modified_base 78: mod_base = OTHER; note = 2'-O-Methyl-adenosine
  modified_base 79: mod_base = OTHER; note = 2'-O-Methyl-guanosine
  modified_base 80: mod_base = OTHER; note = 2'-O-Methyl-uridine
  modified_base 81: mod_base = OTHER; note = 2'-O-Methyl-guanosine
  modified_base 83: mod_base = OTHER; note = 2'-O-Methyl-cytidine
  modified_base 84: mod_base = OTHER; note = 2'-O-Methyl-adenosine
  modified_base 85: mod_base = OTHER; note = 2'-O-Methyl-cytidine
  modified_base 86: mod_base = OTHER; note = 2'-O-Methyl-cytidine
  modified_base 87: mod_base = OTHER; note = 2'-O-Methyl-guanosine
  modified_base 88: mod_base = OTHER; note = 2'-O-Methyl-adenosine
  modified_base 89: mod_base = OTHER; note = 2'-O-Methyl-guanosine
  modified_base 90: mod_base = OTHER; note = 2'-O-Methyl-uridine
  modified_base 91: mod_base = OTHER; note = 2'-O-Methyl-cytidine
  modified_base 92: mod_base = OTHER; note = 2'-O-Methyl-guanosine
  modified_base 93: mod_base = OTHER; note = 2'-O-Methyl-guanosine
  modified_base 94: mod_base = OTHER; note = 2'-O-Methyl-uridine
  modified_base 95: mod_base = OTHER; note = 2'-O-Methyl-guanosine
  modified_base 96: mod_base = OTHER; note = 2'-O-Methyl-cytidine
  modified_base 97: mod_base = OTHER; note = 2'-O-Methyl-uridine
  modified_base 98: mod_base = OTHER; note = 2'-O-Methyl-uridine phosphorothioate
  modified_base 99: mod_base = OTHER; note = 2'-O-Methyl-uridine phosphorothioate
  modified_base 100: mod_base = OTHER; note = 2'-O-Methyl-uridine

SEQ ID NO: 2728 - RNA, 103 nt, synthetic construct; identical to SEQ ID NO: 1699
  source 1..103: mol_type = other RNA
  modified_base 1: mod_base = OTHER; note = 2'-O-Methyl-guanosine phosphorothioate
  modified_base 2: mod_base = OTHER; note = 2'-O-Methyl-adenosine phosphorothioate
  modified_base 3: mod_base = OTHER; note = 2'-O-Methyl-guanosine
  modified_base 21: mod_base = OTHER; note = 2'-O-Methyl-guanosine
  modified_base 25: mod_base = OTHER; note = uridine phosphorothioate
  modified_base 28: mod_base = OTHER; note = 2'-O-Methyl-adenosine
  modified_base 29: mod_base = OTHER; note = 2'-O-Methyl-guanosine
  modified_base 30: mod_base = OTHER; note = 2'-O-Methyl-cytidine
  modified_base 31: mod_base = OTHER; note = 2'-O-Methyl-uridine
  modified_base 32: mod_base = OTHER; note = 2'-O-Methyl-adenosine
  modified_base 33: mod_base = OTHER; note = 2'-O-Methyl-guanosine
  modified_base 34: mod_base = OTHER; note = 2'-O-Methyl-adenosine
  modified_base 35: mod_base = OTHER; note = 2'-O-Methyl-adenosine
  modified_base 36: mod_base = OTHER; note = 2'-O-Methyl-adenosine
  modified_base 37: mod_base = OTHER; note = 2'-O-Methyl-uridine
  modified_base 38: mod_base = OTHER; note = 2'-O-Methyl-adenosine
  modified_base 39: mod_base = OTHER; note = 2'-O-Methyl-guanosine
  modified_base 40: mod_base = OTHER; note = 2'-O-Methyl-cytidine
  modified_base 41: mod_base = OTHER; note = 2'-O-Methyl-adenosine
  modified_base 42: mod_base = OTHER; note = 2'-O-Methyl-adenosine
  modified_base 45: mod_base = OTHER; note = uridine phosphorothioate
  modified_base 46: mod_base = OTHER; note = 2'-O-Methyl-adenosine
  modified_base 48: mod_base = OTHER; note = 2'-O-Methyl-adenosine
  modified_base 50: mod_base = OTHER; note = 2'-O-Methyl-uridine
  modified_base 52: mod_base = OTHER; note = 2'-O-Methyl-adenosine
  modified_base 53: mod_base = OTHER; note = 2'-O-Methyl-guanosine
  modified_base 54: mod_base = OTHER; note = 2'-O-Methyl-guanosine
  modified_base 55: mod_base = OTHER; note = 2'-O-Methyl-cytidine
  modified_base 56: mod_base = OTHER; note = 2'-O-Methyl-uridine
  modified_base 57: mod_base = OTHER; note = 2'-O-Methyl-adenosine
  modified_base 60: mod_base = OTHER; note = 2'-O-Methyl-cytidine
  modified_base 61: mod_base = OTHER; note = 2'-O-Methyl-cytidine
  modified_base 66: mod_base = OTHER; note = 2'-O-Methyl-uridine
  modified_base 67: mod_base = OTHER; note = 2'-O-Methyl-cytidine
  modified_base 70: mod_base = OTHER; note = 2'-O-Methyl-cytidine
  modified_base 71: mod_base = OTHER; note = 2'-O-Methyl-uridine
  modified_base 72: mod_base = OTHER; note = 2'-O-Methyl-uridine
  modified_base 73: mod_base = OTHER; note = 2'-O-Methyl-guanosine
  modified_base 74: mod_base = OTHER; note = 2'-O-Methyl-adenosine
  modified_base 75: mod_base = OTHER; note = 2'-O-Methyl-adenosine
  modified_base 76: mod_base = OTHER; note = 2'-O-Methyl-adenosine
  modified_base 77: mod_base = OTHER; note = 2'-O-Methyl-adenosine
  modified_base 78: mod_base = OTHER; note = 2'-O-Methyl-adenosine
  modified_base 79: mod_base = OTHER; note = 2'-O-Methyl-guanosine
  modified_base 80: mod_base = OTHER; note = 2'-O-Methyl-uridine
  modified_base 81: mod_base = OTHER; note = 2'-O-Methyl-guanosine
  modified_base 83: mod_base = OTHER; note = 2'-O-Methyl-cytidine
  modified_base 84: mod_base = OTHER; note = 2'-O-Methyl-adenosine
  modified_base 85: mod_base = OTHER; note = 2'-O-Methyl-cytidine
  modified_base 86: mod_base = OTHER; note = 2'-O-Methyl-cytidine
  modified_base 87: mod_base = OTHER; note = 2'-O-Methyl-guanosine
  modified_base 88: mod_base = OTHER; note = 2'-O-Methyl-adenosine
  modified_base 89: mod_base = OTHER; note = 2'-O-Methyl-guanosine
  modified_base 90: mod_base = OTHER; note = 2'-O-Methyl-uridine
  modified_base 91: mod_base = OTHER; note = 2'-O-Methyl-cytidine
  modified_base 92: mod_base = OTHER; note = 2'-O-Methyl-guanosine
  modified_base 93: mod_base = OTHER; note = 2'-O-Methyl-guanosine
  modified_base 94: mod_base = OTHER; note = 2'-O-Methyl-uridine
  modified_base 95: mod_base = OTHER; note = 2'-O-Methyl-guanosine
  modified_base 96: mod_base = OTHER; note = 2'-O-Methyl-cytidine
  modified_base 97: mod_base = OTHER; note = 2'-O-Methyl-uridine
  modified_base 98: mod_base = OTHER; note = 2'-O-Methyl-uridine phosphorothioate
  modified_base 99: mod_base = OTHER; note = 2'-O-Methyl-uridine phosphorothioate
  modified_base 100: mod_base = OTHER; note = 2'-O-Methyl-uridine

SEQ ID NO: 2729 - RNA, 103 nt, synthetic construct; identical to SEQ ID NO: 1699
  source 1..103: mol_type = other RNA
  modified_base 1: mod_base = OTHER; note = 2'-O-Methyl-guanosine phosphorothioate
  modified_base 2: mod_base = OTHER; note = 2'-O-Methyl-adenosine phosphorothioate
  modified_base 3: mod_base = OTHER; note = 2'-O-Methyl-guanosine
  modified_base 21: mod_base = OTHER; note = 2'-O-Methyl-guanosine
  modified_base 25: mod_base = OTHER; note = uridine phosphorothioate
  modified_base 28: mod_base = OTHER; note = 2'-O-Methyl-adenosine
  modified_base 29: mod_base = OTHER; note = 2'-O-Methyl-guanosine
  modified_base 30: mod_base = OTHER; note = 2'-O-Methyl-cytidine
  modified_base 31: mod_base = OTHER; note = 2'-O-Methyl-uridine
  modified_base 32: mod_base = OTHER; note = 2'-O-Methyl-adenosine
  modified_base 34: mod_base = OTHER; note = 2'-O-Methyl-adenosine
  modified_base 35: mod_base = OTHER; note = 2'-O-Methyl-adenosine
  modified_base 36: mod_base = OTHER; note = 2'-O-Methyl-adenosine
  modified_base 37: mod_base = OTHER; note = 2'-O-Methyl-uridine
  modified_base 38: mod_base = OTHER; note = 2'-O-Methyl-adenosine
  modified_base 39: mod_base = OTHER; note = 2'-O-Methyl-guanosine
  modified_base 40: mod_base = OTHER; note = 2'-O-Methyl-cytidine
  modified_base 41: mod_base = OTHER; note = 2'-O-Methyl-adenosine
  modified_base 42: mod_base = OTHER; note = 2'-O-Methyl-adenosine
  modified_base 45: mod_base = OTHER; note = uridine phosphorothioate
  modified_base 46: mod_base = OTHER; note = 2'-O-Methyl-adenosine
  modified_base 48: mod_base = OTHER; note = 2'-O-Methyl-adenosine
  modified_base 50: mod_base = OTHER; note = 2'-O-Methyl-uridine
  modified_base 52: mod_base = OTHER; note = 2'-O-Methyl-adenosine
  modified_base 53: mod_base = OTHER; note = 2'-O-Methyl-guanosine
  modified_base 54: mod_base = OTHER; note = 2'-O-Methyl-guanosine
  modified_base 55: mod_base = OTHER; note = 2'-O-Methyl-cytidine
  modified_base 56: mod_base = OTHER; note = 2'-O-Methyl-uridine
  modified_base 57: mod_base = OTHER; note = 2'-O-Methyl-adenosine
  modified_base 60: mod_base = OTHER; note = 2'-O-Methyl-cytidine
  modified_base 61: mod_base = OTHER; note = 2'-O-Methyl-cytidine
  modified_base 66: mod_base = OTHER; note = 2'-O-Methyl-uridine
  modified_base 67: mod_base = OTHER; note = 2'-O-Methyl-cytidine
  modified_base 70: mod_base = OTHER; note = 2'-O-Methyl-cytidine
  modified_base 71: mod_base = OTHER; note = 2'-O-Methyl-uridine
  modified_base 72: mod_base = OTHER; note = 2'-O-Methyl-uridine
  modified_base 74: mod_base = OTHER; note = 2'-O-Methyl-adenosine
  modified_base 75: mod_base = OTHER; note = 2'-O-Methyl-adenosine
  modified_base 76: mod_base = OTHER; note = 2'-O-Methyl-adenosine
  modified_base 77: mod_base = OTHER; note = 2'-O-Methyl-adenosine
  modified_base 78: mod_base = OTHER; note = 2'-O-Methyl-adenosine
  modified_base 79: mod_base = OTHER; note = 2'-O-Methyl-guanosine
  modified_base 80: mod_base = OTHER; note = 2'-O-Methyl-uridine
  modified_base 81: mod_base = OTHER; note = 2'-O-Methyl-guanosine
  modified_base 83: mod_base = OTHER; note = 2'-O-Methyl-cytidine
  modified_base 84: mod_base = OTHER; note = 2'-O-Methyl-adenosine
  modified_base 85: mod_base = OTHER; note = 2'-O-Methyl-cytidine
  modified_base 86: mod_base = OTHER; note = 2'-O-Methyl-cytidine
  modified_base 87: mod_base = OTHER; note = 2'-O-Methyl-guanosine
  modified_base 88: mod_base = OTHER; note = 2'-O-Methyl-adenosine
  modified_base 89: mod_base = OTHER; note = 2'-O-Methyl-guanosine
  modified_base 90: mod_base = OTHER; note = 2'-O-Methyl-uridine
  modified_base 91: mod_base = OTHER; note = 2'-O-Methyl-cytidine
  modified_base 92: mod_base = OTHER; note = 2'-O-Methyl-guanosine
  modified_base 93: mod_base = OTHER; note = 2'-O-Methyl-guanosine
  modified_base 94: mod_base = OTHER; note = 2'-O-Methyl-uridine
  modified_base 95: mod_base = OTHER; note = 2'-O-Methyl-guanosine
  modified_base 96: mod_base = OTHER; note = 2'-O-Methyl-cytidine
  modified_base 97: mod_base = OTHER; note = 2'-O-Methyl-uridine
  modified_base 98: mod_base = OTHER; note = 2'-O-Methyl-uridine phosphorothioate
  modified_base 99: mod_base = OTHER; note = 2'-O-Methyl-uridine phosphorothioate
  modified_base 100: mod_base = OTHER; note = 2'-O-Methyl-uridine

SEQ ID NO: 2730 - RNA, 103 nt, synthetic construct; identical to SEQ ID NO: 1700
  source 1..103: mol_type = other RNA
  modified_base 1: mod_base = OTHER; note = 2'-O-Methyl-cytidine phosphorothioate
  modified_base 2: mod_base = OTHER; note = 2'-O-Methyl-adenosine phosphorothioate
  modified_base 3: mod_base = OTHER; note = 2'-O-Methyl-guanosine
  modified_base 21: mod_base = OTHER; note = 2'-O-Methyl-guanosine
  modified_base 25: mod_base = OTHER; note = uridine phosphorothioate
  modified_base 28: mod_base = OTHER; note = 2'-O-Methyl-adenosine
  modified_base 29: mod_base = OTHER; note = 2'-O-Methyl-guanosine
  modified_base 30: mod_base = OTHER; note = 2'-O-Methyl-cytidine
  modified_base 31: mod_base = OTHER; note = 2'-O-Methyl-uridine
  modified_base 32: mod_base = OTHER; note = 2'-O-Methyl-adenosine
  modified_base 33: mod_base = OTHER; note = 2'-O-Methyl-guanosine
  modified_base 34: mod_base = OTHER; note = 2'-O-Methyl-adenosine
  modified_base 35: mod_base = OTHER; note = 2'-O-Methyl-adenosine
  modified_base 36: mod_base = OTHER; note = 2'-O-Methyl-adenosine
  modified_base 37: mod_base = OTHER; note = 2'-O-Methyl-uridine
  modified_base 38: mod_base = OTHER; note = 2'-O-Methyl-adenosine
  modified_base 39: mod_base = OTHER; note = 2'-O-Methyl-guanosine
  modified_base 40: mod_base = OTHER; note = 2'-O-Methyl-cytidine
  modified_base 41: mod_base = OTHER; note = 2'-O-Methyl-adenosine
  modified_base 42: mod_base = OTHER; note = 2'-O-Methyl-adenosine
  modified_base 45: mod_base = OTHER; note = uridine phosphorothioate
  modified_base 46: mod_base = OTHER; note = 2'-O-Methyl-adenosine
  modified_base 48: mod_base = OTHER; note = 2'-O-Methyl-adenosine
  modified_base 50: mod_base = OTHER; note = 2'-O-Methyl-uridine
  modified_base 52: mod_base = OTHER; note = 2'-O-Methyl-adenosine
  modified_base 53: mod_base = OTHER; note = 2'-O-Methyl-guanosine
  modified_base 54: mod_base = OTHER; note = 2'-O-Methyl-guanosine
  modified_base 57: mod_base = OTHER; note = 2'-O-Methyl-adenosine
  modified_base 61: mod_base = OTHER; note = 2'-O-Methyl-cytidine
  modified_base 66: mod_base = OTHER; note = 2'-O-Methyl-uridine
  modified_base 67: mod_base = OTHER; note = 2'-O-Methyl-cytidine
  modified_base 70: mod_base = OTHER; note = 2'-O-Methyl-cytidine
  modified_base 71: mod_base = OTHER; note = 2'-O-Methyl-uridine
  modified_base 72: mod_base = OTHER; note = 2'-O-Methyl-uridine
  modified_base 74: mod_base = OTHER; note = 2'-O-Methyl-adenosine
  modified_base 75: mod_base = OTHER; note = 2'-O-Methyl-adenosine
  modified_base 76: mod_base = OTHER; note = 2'-O-Methyl-adenosine
  modified_base 77: mod_base = OTHER; note = 2'-O-Methyl-adenosine
  modified_base 78: mod_base = OTHER; note = 2'-O-Methyl-adenosine
  modified_base 79: mod_base = OTHER; note = 2'-O-Methyl-guanosine
  modified_base 80: mod_base = OTHER; note = 2'-O-Methyl-uridine
  modified_base 82: mod_base = OTHER; note = 2'-O-Methyl-guanosine
  modified_base 83: mod_base = OTHER; note = 2'-O-Methyl-cytidine
  modified_base 84: mod_base = OTHER; note = 2'-O-Methyl-adenosine
  modified_base 85: mod_base = OTHER; note = 2'-O-Methyl-cytidine
  modified_base 86: mod_base = OTHER; note = 2'-O-Methyl-cytidine
  modified_base 87: mod_base = OTHER; note = 2'-O-Methyl-guanosine
  modified_base 89: mod_base = OTHER; note = 2'-O-Methyl-guanosine
  modified_base 92: mod_base = OTHER; note = 2'-O-Methyl-guanosine
  modified_base 93: mod_base = OTHER; note = 2'-O-Methyl-guanosine
  modified_base 94: mod_base = OTHER; note = 2'-O-Methyl-uridine
  modified_base 95: mod_base = OTHER; note = 2'-O-Methyl-guanosine
  modified_base 96: mod_base = OTHER; note = 2'-O-Methyl-cytidine
  modified_base 97: mod_base = OTHER; note = 2'-O-Methyl-uridine
  modified_base 98: mod_base = OTHER; note = 2'-O-Methyl-uridine phosphorothioate
  modified_base 99: mod_base = OTHER; note = 2'-O-Methyl-uridine phosphorothioate
  modified_base 100: mod_base = OTHER; note = 2'-O-Methyl-uridine

SEQ ID NO: 2731 - RNA, 103 nt, synthetic construct; identical to SEQ ID NO: 1700
  source 1..103: mol_type = other RNA
  modified_base 1: mod_base = OTHER; note = 2'-O-Methyl-cytidine phosphorothioate
  modified_base 2: mod_base = OTHER; note = 2'-O-Methyl-adenosine phosphorothioate
  modified_base 3: mod_base = OTHER; note = 2'-O-Methyl-guanosine
  modified_base 21: mod_base = OTHER; note = 2'-O-Methyl-guanosine
  modified_base 25: mod_base = OTHER; note = uridine phosphorothioate
  modified_base 28: mod_base = OTHER; note = 2'-O-Methyl-adenosine
  modified_base 29: mod_base = OTHER; note = 2'-O-Methyl-guanosine
  modified_base 30: mod_base = OTHER; note = 2'-O-Methyl-cytidine
  modified_base 31: mod_base = OTHER; note = 2'-O-Methyl-uridine
  modified_base 32: mod_base = OTHER; note = 2'-O-Methyl-adenosine
  modified_base 33: mod_base = OTHER; note = 2'-O-Methyl-guanosine
  modified_base 34: mod_base = OTHER; note = 2'-O-Methyl-adenosine
  modified_base 35: mod_base = OTHER; note = 2'-O-Methyl-adenosine
  modified_base 36: mod_base = OTHER; note = 2'-O-Methyl-adenosine
  modified_base 37: mod_base = OTHER; note = 2'-O-Methyl-uridine
  modified_base 38: mod_base = OTHER; note = 2'-O-Methyl-adenosine
  modified_base 39: mod_base = OTHER; note = 2'-O-Methyl-guanosine
  modified_base 40: mod_base = OTHER; note = 2'-O-Methyl-cytidine
  modified_base 41: mod_base = OTHER; note = 2'-O-Methyl-adenosine
  modified_base 42: mod_base = OTHER; note = 2'-O-Methyl-adenosine
  modified_base 45: mod_base = OTHER; note = uridine phosphorothioate
  modified_base 46: mod_base = OTHER; note = 2'-O-Methyl-adenosine
  modified_base 48: mod_base = OTHER; note = 2'-O-Methyl-adenosine
  modified_base 50: mod_base = OTHER; note = 2'-O-Methyl-uridine
  modified_base 52: mod_base = OTHER; note = 2'-O-Methyl-adenosine
  modified_base 53: mod_base = OTHER; note = 2'-O-Methyl-guanosine
  modified_base 54: mod_base = OTHER; note = 2'-O-Methyl-guanosine
  modified_base 55: mod_base = OTHER; note = 2'-O-Methyl-cytidine
  modified_base 56: mod_base = OTHER; note = 2'-O-Methyl-uridine
  modified_base 57: mod_base = OTHER; note = 2'-O-Methyl-adenosine
  modified_base 60: mod_base = OTHER; note = 2'-O-Methyl-cytidine
  modified_base 61: mod_base = OTHER; note = 2'-O-Methyl-cytidine
  modified_base 66: mod_base = OTHER; note = 2'-O-Methyl-uridine
  modified_base 67: mod_base = OTHER; note = 2'-O-Methyl-cytidine
  modified_base 70: mod_base = OTHER; note = 2'-O-Methyl-cytidine
  modified_base 71: mod_base = OTHER; note = 2'-O-Methyl-uridine
  modified_base 72: mod_base = OTHER; note = 2'-O-Methyl-uridine
  modified_base 74: mod_base = OTHER; note = 2'-O-Methyl-adenosine
  modified_base 75: mod_base = OTHER; note = 2'-O-Methyl-adenosine
  modified_base 76: mod_base = OTHER; note = 2'-O-Methyl-adenosine
  modified_base 77: mod_base = OTHER; note = 2'-O-Methyl-adenosine
  modified_base 78: mod_base = OTHER; note = 2'-O-Methyl-adenosine
  modified_base 79: mod_base = OTHER; note = 2'-O-Methyl-guanosine
  modified_base 80: mod_base = OTHER; note = 2'-O-Methyl-uridine
  modified_base 82: mod_base = OTHER; note = 2'-O-Methyl-guanosine
  modified_base 83: mod_base = OTHER; note = 2'-O-Methyl-cytidine
  modified_base 84: mod_base = OTHER; note = 2'-O-Methyl-adenosine
  modified_base 85: mod_base = OTHER; note = 2'-O-Methyl-cytidine
  modified_base 86: mod_base = OTHER; note = 2'-O-Methyl-cytidine
  modified_base 87: mod_base = OTHER; note = 2'-O-Methyl-guanosine
  modified_base 89: mod_base = OTHER; note = 2'-O-Methyl-guanosine
  modified_base 92: mod_base = OTHER; note = 2'-O-Methyl-guanosine
  modified_base 93: mod_base = OTHER; note = 2'-O-Methyl-guanosine
  modified_base 94: mod_base = OTHER; note = 2'-O-Methyl-uridine
  modified_base 95: mod_base = OTHER; note = 2'-O-Methyl-guanosine
  modified_base 96: mod_base = OTHER; note = 2'-O-Methyl-cytidine
  modified_base 97: mod_base = OTHER; note = 2'-O-Methyl-uridine
  modified_base 98: mod_base = OTHER; note = 2'-O-Methyl-uridine phosphorothioate
  modified_base 99: mod_base = OTHER; note = 2'-O-Methyl-uridine phosphorothioate
  modified_base 100: mod_base = OTHER; note = 2'-O-Methyl-uridine

SEQ ID NO: 2732 - RNA, 103 nt, synthetic construct; identical to SEQ ID NO: 1700
  source 1..103: mol_type = other RNA
  modified_base 1: mod_base = OTHER; note = 2'-O-Methyl-cytidine phosphorothioate
  modified_base 2: mod_base = OTHER; note = 2'-O-Methyl-adenosine phosphorothioate
  modified_base 3: mod_base = OTHER; note = 2'-O-Methyl-guanosine
  modified_base 21: mod_base = OTHER; note = 2'-O-Methyl-guanosine
  modified_base 25: mod_base = OTHER; note = uridine phosphorothioate
  modified_base 28: mod_base = OTHER; note = 2'-O-Methyl-adenosine
  modified_base 29: mod_base = OTHER; note = 2'-O-Methyl-guanosine
  modified_base 30: mod_base = OTHER; note = 2'-O-Methyl-cytidine
  modified_base 31: mod_base = OTHER; note = 2'-O-Methyl-uridine
  modified_base 32: mod_base = OTHER; note = 2'-O-Methyl-adenosine
  modified_base 33: mod_base = OTHER; note = 2'-O-Methyl-guanosine
  modified_base 34: mod_base = OTHER; note = 2'-O-Methyl-adenosine
  modified_base 35: mod_base = OTHER; note = 2'-O-Methyl-adenosine
  modified_base 36: mod_base = OTHER; note = 2'-O-Methyl-adenosine
  modified_base 37: mod_base = OTHER; note = 2'-O-Methyl-uridine
  modified_base 38: mod_base = OTHER; note = 2'-O-Methyl-adenosine
  modified_base 39: mod_base = OTHER; note = 2'-O-Methyl-guanosine
  modified_base 40: mod_base = OTHER; note = 2'-O-Methyl-cytidine
  modified_base 41: mod_base = OTHER; note = 2'-O-Methyl-adenosine
  modified_base 42: mod_base = OTHER; note = 2'-O-Methyl-adenosine
  modified_base 45: mod_base = OTHER; note = uridine phosphorothioate
  modified_base 46: mod_base = OTHER; note = 2'-O-Methyl-adenosine
  modified_base 48: mod_base = OTHER; note = 2'-O-Methyl-adenosine
  modified_base 50: mod_base = OTHER; note = 2'-O-Methyl-uridine
  modified_base 52: mod_base = OTHER; note = 2'-O-Methyl-adenosine
  modified_base 53: mod_base = OTHER; note = 2'-O-Methyl-guanosine
  modified_base 54: mod_base = OTHER; note = 2'-O-Methyl-guanosine
  modified_base 57: mod_base = OTHER; note = 2'-O-Methyl-adenosine
  modified_base 61: mod_base = OTHER; note = 2'-O-Methyl-cytidine
  modified_base 66: mod_base = OTHER; note = 2'-O-Methyl-uridine
  modified_base 67: mod_base = OTHER; note = 2'-O-Methyl-cytidine
  modified_base 70: mod_base = OTHER; note = 2'-O-Methyl-cytidine
  modified_base 71: mod_base = OTHER; note = 2'-O-Methyl-uridine
  modified_base 72: mod_base = OTHER; note = 2'-O-Methyl-uridine
  modified_base 73: mod_base = OTHER; note = 2'-O-Methyl-guanosine
  modified_base 74: mod_base = OTHER; note = 2'-O-Methyl-adenosine
  modified_base 75: mod_base = OTHER; note = 2'-O-Methyl-adenosine
  modified_base 76: mod_base = OTHER; note = 2'-O-Methyl-adenosine
  modified_base 77: mod_base = OTHER; note = 2'-O-Methyl-adenosine
  modified_base 78: mod_base = OTHER; note = 2'-O-Methyl-adenosine
  modified_base 79: mod_base = OTHER; note = 2'-O-Methyl-guanosine
  modified_base 80: mod_base = OTHER; note = 2'-O-Methyl-uridine
  modified_base 82: mod_base = OTHER; note = 2'-O-Methyl-guanosine
  modified_base 83: mod_base = OTHER; note = 2'-O-Methyl-cytidine
  modified_base 84: mod_base = OTHER; note = 2'-O-Methyl-adenosine
  modified_base 85: mod_base = OTHER; note = 2'-O-Methyl-cytidine
  modified_base 86: mod_base = OTHER; note = 2'-O-Methyl-cytidine
  modified_base 87: mod_base = OTHER; note = 2'-O-Methyl-guanosine
  modified_base 89: mod_base = OTHER; note = 2'-O-Methyl-guanosine
  modified_base 92: mod_base = OTHER; note = 2'-O-Methyl-guanosine
  modified_base 93: mod_base = OTHER; note = 2'-O-Methyl-guanosine
  modified_base 94: mod_base = OTHER; note = 2'-O-Methyl-uridine
  modified_base 95: mod_base = OTHER; note = 2'-O-Methyl-guanosine
  modified_base 96: mod_base = OTHER; note = 2'-O-Methyl-cytidine
  modified_base 97: mod_base = OTHER; note = 2'-O-Methyl-uridine
  modified_base 98: mod_base = OTHER; note = 2'-O-Methyl-uridine phosphorothioate
  modified_base 99: mod_base = OTHER; note = 2'-O-Methyl-uridine phosphorothioate
  modified_base 100: mod_base = OTHER; note = 2'-O-Methyl-uridine

SEQ ID NO: 2733 - RNA, 103 nt, synthetic construct; identical to SEQ ID NO: 1700
  source 1..103: mol_type = other RNA
  modified_base 1: mod_base = OTHER; note = 2'-O-Methyl-cytidine phosphorothioate
  modified_base 2: mod_base = OTHER; note = 2'-O-Methyl-adenosine phosphorothioate
  modified_base 3: mod_base = OTHER; note = 2'-O-Methyl-guanosine
  modified_base 21: mod_base = OTHER; note = 2'-O-Methyl-guanosine
  modified_base 25: mod_base = OTHER; note = uridine phosphorothioate
  modified_base 28: mod_base = OTHER; note = 2'-O-Methyl-adenosine
  modified_base 29: mod_base = OTHER; note = 2'-O-Methyl-guanosine
  modified_base 30: mod_base = OTHER; note = 2'-O-Methyl-cytidine
  modified_base 31: mod_base = OTHER; note = 2'-O-Methyl-uridine
  modified_base 32: mod_base = OTHER; note = 2'-O-Methyl-adenosine
  modified_base 33: mod_base = OTHER; note = 2'-O-Methyl-guanosine
  modified_base 34: mod_base = OTHER; note = 2'-O-Methyl-adenosine
  modified_base 35: mod_base = OTHER; note = 2'-O-Methyl-adenosine
  modified_base 36: mod_base = OTHER; note = 2'-O-Methyl-adenosine
  modified_base 37: mod_base = OTHER; note = 2'-O-Methyl-uridine
  modified_base 38: mod_base = OTHER; note = 2'-O-Methyl-adenosine
  modified_base 39: mod_base = OTHER; note = 2'-O-Methyl-guanosine
  modified_base 40: mod_base = OTHER; note = 2'-O-Methyl-cytidine
  modified_base 41: mod_base = OTHER; note = 2'-O-Methyl-adenosine
  modified_base 42: mod_base = OTHER; note = 2'-O-Methyl-adenosine
  modified_base 45: mod_base = OTHER; note = uridine phosphorothioate
  modified_base 46: mod_base = OTHER; note = 2'-O-Methyl-adenosine
  modified_base 48: mod_base = OTHER; note = 2'-O-Methyl-adenosine
  modified_base 50: mod_base = OTHER; note = 2'-O-Methyl-uridine
  modified_base 52: mod_base = OTHER; note = 2'-O-Methyl-adenosine
  modified_base 53: mod_base = OTHER; note = 2'-O-Methyl-guanosine
  modified_base 54: mod_base = OTHER; note = 2'-O-Methyl-guanosine
  modified_base 57: mod_base = OTHER; note = 2'-O-Methyl-adenosine
  modified_base 61: mod_base = OTHER; note = 2'-O-Methyl-cytidine
  modified_base 66: mod_base = OTHER; note = 2'-O-Methyl-uridine
  modified_base 67: mod_base = OTHER; note = 2'-O-Methyl-cytidine
  modified_base 70: mod_base = OTHER; note = 2'-O-Methyl-cytidine
  modified_base 71: mod_base = OTHER; note = 2'-O-Methyl-uridine
  modified_base 72: mod_base = OTHER; note = 2'-O-Methyl-uridine
  modified_base 73: mod_base = OTHER; note = 2'-O-Methyl-guanosine
  modified_base 74: mod_base = OTHER; note = 2'-O-Methyl-adenosine
  modified_base 75: mod_base = OTHER; note = 2'-O-Methyl-adenosine
  modified_base 76: mod_base = OTHER; note = 2'-O-Methyl-adenosine
  modified_base 77: mod_base = OTHER; note = 2'-O-Methyl-adenosine
  modified_base 78: mod_base = OTHER; note = 2'-O-Methyl-adenosine
  modified_base 79: mod_base = OTHER; note = 2'-O-Methyl-guanosine
  modified_base 80: mod_base = OTHER; note = 2'-O-Methyl-uridine
  modified_base 82: mod_base = OTHER; note = 2'-O-Methyl-guanosine
  modified_base 83: mod_base = OTHER; note = 2'-O-Methyl-cytidine
  modified_base 84: mod_base = OTHER; note = 2'-O-Methyl-adenosine
  modified_base 85: mod_base = OTHER; note = 2'-O-Methyl-cytidine
  modified_base 86: mod_base = OTHER; note = 2'-O-Methyl-cytidine
  modified_base 87: mod_base = OTHER; note = 2'-O-Methyl-guanosine
  modified_base 89: mod_base = OTHER; note = 2'-O-Methyl-guanosine
  modified_base 91: mod_base = OTHER; note = 2'-O-Methyl-cytidine
  modified_base 92: mod_base = OTHER; note = 2'-O-Methyl-guanosine
  modified_base 93: mod_base = OTHER; note = 2'-O-Methyl-guanosine
  modified_base 94: mod_base = OTHER; note = 2'-O-Methyl-uridine
  modified_base 95: mod_base = OTHER; note = 2'-O-Methyl-guanosine
  modified_base 96: mod_base = OTHER; note = 2'-O-Methyl-cytidine
  modified_base 97: mod_base = OTHER; note = 2'-O-Methyl-uridine
  modified_base 98: mod_base = OTHER; note = 2'-O-Methyl-uridine phosphorothioate
  modified_base 99: mod_base = OTHER; note = 2'-O-Methyl-uridine phosphorothioate
  modified_base 100: mod_base = OTHER; note = 2'-O-Methyl-uridine

SEQ ID NO: 2734 - RNA, 103 nt, synthetic construct; identical to SEQ ID NO: 1700
  source 1..103: mol_type = other RNA
  modified_base 1: mod_base = OTHER; note = 2'-O-Methyl-cytidine phosphorothioate
  modified_base 2: mod_base = OTHER; note = 2'-O-Methyl-adenosine phosphorothioate
  modified_base 3: mod_base = OTHER; note = 2'-O-Methyl-guanosine
  modified_base 21: mod_base = OTHER; note = 2'-O-Methyl-guanosine
  modified_base 25: mod_base = OTHER; note = uridine phosphorothioate
  modified_base 28: mod_base = OTHER; note = 2'-O-Methyl-adenosine
  modified_base 29: mod_base = OTHER; note = 2'-O-Methyl-guanosine
  modified_base 30: mod_base = OTHER; note = 2'-O-Methyl-cytidine
  modified_base 31: mod_base = OTHER; note = 2'-O-Methyl-uridine
  modified_base 32: mod_base = OTHER; note = 2'-O-Methyl-adenosine
  modified_base 34: mod_base = OTHER; note = 2'-O-Methyl-adenosine
  modified_base 35: mod_base = OTHER; note = 2'-O-Methyl-adenosine
  modified_base 36: mod_base = OTHER; note = 2'-O-Methyl-adenosine
  modified_base 37: mod_base = OTHER; note = 2'-O-Methyl-uridine
  modified_base 38: mod_base = OTHER; note = 2'-O-Methyl-adenosine
  modified_base 39: mod_base = OTHER; note = 2'-O-Methyl-guanosine
  modified_base 40: mod_base = OTHER; note = 2'-O-Methyl-cytidine
  modified_base 41: mod_base = OTHER; note = 2'-O-Methyl-adenosine
  modified_base 42: mod_base = OTHER; note = 2'-O-Methyl-adenosine
  modified_base 45: mod_base = OTHER; note = uridine phosphorothioate
  modified_base 46: mod_base = OTHER; note = 2'-O-Methyl-adenosine
  modified_base 48: mod_base = OTHER; note = 2'-O-Methyl-adenosine
  modified_base 50: mod_base = OTHER; note = 2'-O-Methyl-uridine
  modified_base 52: mod_base = OTHER; note = 2'-O-Methyl-adenosine
  modified_base 53: mod_base = OTHER; note = 2'-O-Methyl-guanosine
  modified_base 54: mod_base = OTHER; note = 2'-O-Methyl-guanosine
  modified_base 57: mod_base = OTHER; note = 2'-O-Methyl-adenosine
  modified_base 61: mod_base = OTHER; note = 2'-O-Methyl-cytidine
  modified_base 66: mod_base = OTHER; note = 2'-O-Methyl-uridine
  modified_base 67: mod_base = OTHER; note = 2'-O-Methyl-cytidine
  modified_base 70: mod_base = OTHER; note = 2'-O-Methyl-cytidine
  modified_base 71: mod_base = OTHER; note = 2'-O-Methyl-uridine
  modified_base 72: mod_base = OTHER; note = 2'-O-Methyl-uridine
  modified_base 73: mod_base = OTHER; note = 2'-O-Methyl-guanosine
  modified_base 74: mod_base = OTHER; note = 2'-O-Methyl-adenosine
  modified_base 75: mod_base = OTHER; note = 2'-O-Methyl-adenosine
  modified_base 76: mod_base = OTHER; note = 2'-O-Methyl-adenosine
  modified_base 77: mod_base = OTHER; note = 2'-O-Methyl-adenosine
  modified_base 78: mod_base = OTHER; note = 2'-O-Methyl-adenosine
  modified_base 79: mod_base = OTHER; note = 2'-O-Methyl-guanosine
  modified_base 80: mod_base = OTHER; note = 2'-O-Methyl-uridine
  modified_base 82: mod_base = OTHER; note = 2'-O-Methyl-guanosine
  modified_base 83: mod_base = OTHER; note = 2'-O-Methyl-cytidine
  modified_base 84: mod_base = OTHER; note = 2'-O-Methyl-adenosine
  modified_base 85: mod_base = OTHER; note = 2'-O-Methyl-cytidine
  modified_base 86: mod_base = OTHER; note = 2'-O-Methyl-cytidine
  modified_base 87: mod_base = OTHER; note = 2'-O-Methyl-guanosine
  modified_base 89: mod_base = OTHER; note = 2'-O-Methyl-guanosine
  modified_base 92: mod_base = OTHER; note = 2'-O-Methyl-guanosine
  modified_base 93: mod_base = OTHER; note = 2'-O-Methyl-guanosine
  modified_base 94: mod_base = OTHER; note = 2'-O-Methyl-uridine
  modified_base 95: mod_base = OTHER; note = 2'-O-Methyl-guanosine
  modified_base 96: mod_base = OTHER; note = 2'-O-Methyl-cytidine
  modified_base 97: mod_base = OTHER; note = 2'-O-Methyl-uridine
  modified_base 98: mod_base = OTHER; note = 2'-O-Methyl-uridine phosphorothioate
  modified_base 99: mod_base = OTHER; note = 2'-O-Methyl-uridine phosphorothioate
  modified_base 100: mod_base = OTHER; note = 2'-O-Methyl-uridine

SEQ ID NO: 2735 - RNA, 103 nt, synthetic construct; identical to SEQ ID NO: 1700
  source 1..103: mol_type = other RNA
  modified_base 1: mod_base = OTHER; note = 2'-O-Methyl-cytidine phosphorothioate
  modified_base 2: mod_base = OTHER; note = 2'-O-Methyl-adenosine phosphorothioate
  modified_base 3: mod_base = OTHER; note = 2'-O-Methyl-guanosine
  modified_base 21: mod_base = OTHER; note = 2'-O-Methyl-guanosine
  modified_base 25: mod_base = OTHER; note = uridine phosphorothioate
  modified_base 28: mod_base = OTHER; note = 2'-O-Methyl-adenosine
  modified_base 29: mod_base = OTHER; note = 2'-O-Methyl-guanosine
  modified_base 30: mod_base = OTHER; note = 2'-O-Methyl-cytidine
  modified_base 31: mod_base = OTHER; note = 2'-O-Methyl-uridine
  modified_base 32: mod_base = OTHER; note = 2'-O-Methyl-adenosine
  modified_base 34: mod_base = OTHER; note = 2'-O-Methyl-adenosine
  modified_base 35: mod_base = OTHER; note = 2'-O-Methyl-adenosine
  modified_base 36: mod_base = OTHER; note = 2'-O-Methyl-adenosine
  modified_base 37: mod_base = OTHER; note = 2'-O-Methyl-uridine
  modified_base 38: mod_base = OTHER; note = 2'-O-Methyl-adenosine
  modified_base 39: mod_base = OTHER; note = 2'-O-Methyl-guanosine
  modified_base 40: mod_base = OTHER; note = 2'-O-Methyl-cytidine
  modified_base 41: mod_base = OTHER; note = 2'-O-Methyl-adenosine
  modified_base 42: mod_base = OTHER; note = 2'-O-Methyl-adenosine
  modified_base 45: mod_base = OTHER; note = uridine phosphorothioate
  modified_base 46: mod_base = OTHER; note = 2'-O-Methyl-adenosine
  modified_base 48: mod_base = OTHER; note = 2'-O-Methyl-adenosine
  modified_base 50: mod_base = OTHER; note = 2'-O-Methyl-uridine
  modified_base 52: mod_base = OTHER; note = 2'-O-Methyl-adenosine
  modified_base 53: mod_base = OTHER; note = 2'-O-Methyl-guanosine
  modified_base 54: mod_base = OTHER; note = 2'-O-Methyl-guanosine
  modified_base 57: mod_base = OTHER; note = 2'-O-Methyl-adenosine
  modified_base 61: mod_base = OTHER; note = 2'-O-Methyl-cytidine
  modified_base 66: mod_base = OTHER; note = 2'-O-Methyl-uridine
  modified_base 67: mod_base = OTHER; note = 2'-O-Methyl-cytidine
  modified_base 70: mod_base = OTHER; note = 2'-O-Methyl-cytidine
  modified_base 71: mod_base = OTHER; note = 2'-O-Methyl-uridine
  modified_base 72: mod_base = OTHER; note = 2'-O-Methyl-uridine
  modified_base 73: mod_base = OTHER; note = 2'-O-Methyl-guanosine
  modified_base 74: mod_base = OTHER; note = 2'-O-Methyl-adenosine
  modified_base 75: mod_base = OTHER; note = 2'-O-Methyl-adenosine
  modified_base 76: mod_base = OTHER; note = 2'-O-Methyl-adenosine
  modified_base 77: mod_base = OTHER; note = 2'-O-Methyl-adenosine
  modified_base 78: mod_base = OTHER; note = 2'-O-Methyl-adenosine
  modified_base 79: mod_base = OTHER; note = 2'-O-Methyl-guanosine
  modified_base 80: mod_base = OTHER; note = 2'-O-Methyl-uridine
  modified_base 82: mod_base = OTHER; note = 2'-O-Methyl-guanosine
  modified_base 83: mod_base = OTHER; note = 2'-O-Methyl-cytidine
  modified_base 84: mod_base = OTHER; note = 2'-O-Methyl-adenosine
  modified_base 85: mod_base = OTHER; note = 2'-O-Methyl-cytidine
  modified_base 86: mod_base = OTHER; note = 2'-O-Methyl-cytidine
  modified_base 87: mod_base = OTHER; note = 2'-O-Methyl-guanosine
  modified_base 89: mod_base = OTHER; note = 2'-O-Methyl-guanosine
  modified_base 91: mod_base = OTHER; note = 2'-O-Methyl-cytidine
  modified_base 92: mod_base = OTHER; note = 2'-O-Methyl-guanosine
  modified_base 93: mod_base = OTHER; note = 2'-O-Methyl-guanosine
  modified_base 94: mod_base = OTHER; note = 2'-O-Methyl-uridine
  modified_base 95: mod_base = OTHER; note = 2'-O-Methyl-guanosine
  modified_base 96: mod_base = OTHER; note = 2'-O-Methyl-cytidine
  modified_base 97: mod_base = OTHER; note = 2'-O-Methyl-uridine
  modified_base 98: mod_base = OTHER; note = 2'-O-Methyl-uridine phosphorothioate
  modified_base 99: mod_base = OTHER; note = 2'-O-Methyl-uridine phosphorothioate
  modified_base 100: mod_base = OTHER; note = 2'-O-Methyl-uridine

SEQ ID NO: 2736 - RNA, 103 nt, synthetic construct; identical to SEQ ID NO: 1700
  source 1..103: mol_type = other RNA
  modified_base 1: mod_base = OTHER; note = 2'-O-Methyl-cytidine phosphorothioate
  modified_base 2: mod_base = OTHER; note = 2'-O-Methyl-adenosine phosphorothioate
  modified_base 3: mod_base = OTHER; note = 2'-O-Methyl-guanosine
  modified_base 21: mod_base = OTHER; note = 2'-O-Methyl-guanosine
  modified_base 25: mod_base = OTHER; note = uridine phosphorothioate
  modified_base 28: mod_base = OTHER; note = 2'-O-Methyl-adenosine
  modified_base 29: mod_base = OTHER; note = 2'-O-Methyl-guanosine
  modified_base 30: mod_base = OTHER; note = 2'-O-Methyl-cytidine
  modified_base 31: mod_base = OTHER; note = 2'-O-Methyl-uridine
  modified_base 32: mod_base = OTHER; note = 2'-O-Methyl-adenosine
  modified_base 34: mod_base = OTHER; note = 2'-O-Methyl-adenosine
  modified_base 35: mod_base = OTHER; note = 2'-O-Methyl-adenosine
  modified_base 36: mod_base = OTHER; note = 2'-O-Methyl-adenosine
  modified_base 37: mod_base = OTHER; note = 2'-O-Methyl-uridine
  modified_base 38: mod_base = OTHER; note = 2'-O-Methyl-adenosine
  modified_base 39: mod_base = OTHER; note = 2'-O-Methyl-guanosine
  modified_base 40: mod_base = OTHER; note = 2'-O-Methyl-cytidine
  modified_base 41: mod_base = OTHER; note = 2'-O-Methyl-adenosine
  modified_base 42: mod_base = OTHER; note = 2'-O-Methyl-adenosine
  modified_base 45: mod_base = OTHER; note = uridine phosphorothioate
  modified_base 46: mod_base = OTHER; note = 2'-O-Methyl-adenosine
  modified_base 48: mod_base = OTHER; note = 2'-O-Methyl-adenosine
  modified_base 50: mod_base = OTHER; note = 2'-O-Methyl-uridine
  modified_base 52: mod_base = OTHER; note = 2'-O-Methyl-adenosine
  modified_base 53: mod_base = OTHER; note = 2'-O-Methyl-guanosine
  modified_base 54: mod_base = OTHER; note = 2'-O-Methyl-guanosine
  modified_base 55: mod_base = OTHER; note = 2'-O-Methyl-cytidine
  modified_base 56: mod_base = OTHER; note = 2'-O-Methyl-uridine
  modified_base 57: mod_base = OTHER; note = 2'-O-Methyl-adenosine
  modified_base 60: mod_base = OTHER; note = 2'-O-Methyl-cytidine
  modified_base 61: mod_base = OTHER; note = 2'-O-Methyl-cytidine
  modified_base 66: mod_base = OTHER; note = 2'-O-Methyl-uridine
  modified_base 67: mod_base = OTHER; note = 2'-O-Methyl-cytidine
  modified_base 70: mod_base = OTHER; note = 2'-O-Methyl-cytidine
  modified_base 71: mod_base = OTHER; note = 2'-O-Methyl-uridine
  modified_base 72: mod_base = OTHER; note = 2'-O-Methyl-uridine
  modified_base 74: mod_base = OTHER; note = 2'-O-Methyl-adenosine
  modified_base 75: mod_base = OTHER; note = 2'-O-Methyl-adenosine
  modified_base 76: mod_base = OTHER; note = 2'-O-Methyl-adenosine
  modified_base 77: mod_base = OTHER; note = 2'-O-Methyl-adenosine
  modified_base 78: mod_base = OTHER; note = 2'-O-Methyl-adenosine
  modified_base 79: mod_base = OTHER; note = 2'-O-Methyl-guanosine
  modified_base 80: mod_base = OTHER; note = 2'-O-Methyl-uridine
  modified_base 82: mod_base = OTHER; note = 2'-O-Methyl-guanosine
  modified_base 83: mod_base = OTHER; note = 2'-O-Methyl-cytidine
  modified_base 84: mod_base = OTHER; note = 2'-O-Methyl-adenosine
  modified_base 85: mod_base = OTHER; note = 2'-O-Methyl-cytidine
  modified_base 86: mod_base = OTHER; note = 2'-O-Methyl-cytidine
  modified_base 87: mod_base = OTHER; note = 2'-O-Methyl-guanosine
  modified_base 89: mod_base = OTHER; note = 2'-O-Methyl-guanosine
  modified_base 92: mod_base = OTHER; note = 2'-O-Methyl-guanosine
  modified_base 93: mod_base = OTHER; note = 2'-O-Methyl-guanosine
  modified_base 94: mod_base = OTHER; note = 2'-O-Methyl-uridine
  modified_base 95: mod_base = OTHER; note = 2'-O-Methyl-guanosine
  modified_base 96: mod_base = OTHER; note = 2'-O-Methyl-cytidine
  modified_base 97: mod_base = OTHER; note = 2'-O-Methyl-uridine
  modified_base 98: mod_base = OTHER; note = 2'-O-Methyl-uridine phosphorothioate
  modified_base 99: mod_base = OTHER; note = 2'-O-Methyl-uridine phosphorothioate
  modified_base 100: mod_base = OTHER; note = 2'-O-Methyl-uridine

SEQ ID NO: 2737 - RNA, 103 nt, synthetic construct; identical to SEQ ID NO: 1643
  source 1..103: mol_type = other RNA
  modified_base 1: mod_base = OTHER; note = 2'-O-Methyl-cytidine phosphorothioate
  modified_base 2: mod_base = OTHER; note = 2'-O-Methyl-cytidine phosphorothioate
  modified_base 3: mod_base = OTHER; note = 2'-O-Methyl-cytidine
  modified_base 21: mod_base = OTHER; note = 2'-O-Methyl-guanosine
  modified_base 25: mod_base = OTHER; note = uridine phosphorothioate
  modified_base 28: mod_base = OTHER; note = 2'-O-Methyl-adenosine
  modified_base 29: mod_base = OTHER; note = 2'-O-Methyl-guanosine
  modified_base 30: mod_base = OTHER; note = 2'-O-Methyl-cytidine
  modified_base 31: mod_base = OTHER; note = 2'-O-Methyl-uridine
  modified_base 32: mod_base = OTHER; note = 2'-O-Methyl-adenosine
  modified_base 33: mod_base = OTHER; note = 2'-O-Methyl-guanosine
  modified_base 34: mod_base = OTHER; note = 2'-O-Methyl-adenosine
  modified_base 35: mod_base = OTHER; note = 2'-O-Methyl-adenosine
  modified_base 36: mod_base = OTHER; note = 2'-O-Methyl-adenosine
  modified_base 37: mod_base = OTHER; note = 2'-O-Methyl-uridine
  modified_base 38: mod_base = OTHER; note = 2'-O-Methyl-adenosine
  modified_base 39: mod_base = OTHER; note = 2'-O-Methyl-guanosine
  modified_base 40: mod_base = OTHER; note = 2'-O-Methyl-cytidine
  modified_base 41: mod_base = OTHER; note = 2'-O-Methyl-adenosine
  modified_base 42: mod_base = OTHER; note = 2'-O-Methyl-adenosine
  modified_base 46: mod_base = OTHER; note = 2'-O-Methyl-adenosine
  modified_base 48: mod_base = OTHER; note = 2'-O-Methyl-adenosine
  modified_base 50: mod_base = OTHER; note = 2'-O-Methyl-uridine
  modified_base 52: mod_base = OTHER; note = 2'-O-Methyl-adenosine
  modified_base 53: mod_base = OTHER; note = 2'-O-Methyl-guanosine
  modified_base 54: mod_base = OTHER; note = 2'-O-Methyl-guanosine
  modified_base 55: mod_base = OTHER; note = 2'-O-Methyl-cytidine
  modified_base 56: mod_base = OTHER; note = 2'-O-Methyl-uridine
  modified_base 57: mod_base = OTHER; note = 2'-O-Methyl-adenosine
  modified_base 60: mod_base = OTHER; note = 2'-O-Methyl-cytidine
  modified_base 61: mod_base = OTHER; note = 2'-O-Methyl-cytidine
  modified_base 64: mod_base = OTHER; note = uridine phosphorothioate
  modified_base 66: mod_base = OTHER; note = 2'-O-Methyl-uridine
  modified_base 67: mod_base = OTHER; note = 2'-O-Methyl-cytidine
  modified_base 70: mod_base = OTHER; note = 2'-O-Methyl-cytidine
  modified_base 71: mod_base = OTHER; note = 2'-O-Methyl-uridine
  modified_base 72: mod_base = OTHER; note = 2'-O-Methyl-uridine
  modified_base 73: mod_base = OTHER; note = 2'-O-Methyl-guanosine
  modified_base 74: mod_base = OTHER; note = 2'-O-Methyl-adenosine
  modified_base 75: mod_base = OTHER; note = 2'-O-Methyl-adenosine
  modified_base 76: mod_base = OTHER; note = 2'-O-Methyl-adenosine
  modified_base 77: mod_base = OTHER; note = 2'-O-Methyl-adenosine
  modified_base 78: mod_base = OTHER; note = 2'-O-Methyl-adenosine
  modified_base 79: mod_base = OTHER; note = 2'-O-Methyl-guanosine
  modified_base 80: mod_base = OTHER; note = 2'-O-Methyl-uridine
  modified_base 81: mod_base = OTHER; note = 2'-O-Methyl-guanosine
  modified_base 83: mod_base = OTHER; note = 2'-O-Methyl-cytidine
  modified_base 84: mod_base = OTHER; note = 2'-O-Methyl-adenosine
  modified_base 85: mod_base = OTHER; note = 2'-O-Methyl-cytidine
  modified_base 86: mod_base = OTHER; note = 2'-O-Methyl-cytidine
  modified_base 87: mod_base = OTHER; note = 2'-O-Methyl-guanosine
  modified_base 88: mod_base = OTHER; note = 2'-O-Methyl-adenosine
  modified_base 89: mod_base = OTHER; note = 2'-O-Methyl-guanosine
  modified_base 90: mod_base = OTHER; note = 2'-O-Methyl-uridine
  modified_base 91: mod_base = OTHER; note = 2'-O-Methyl-cytidine
  modified_base 92: mod_base = OTHER; note = 2'-O-Methyl-guanosine
  modified_base 93: mod_base = OTHER; note = 2'-O-Methyl-guanosine
  modified_base 94: mod_base = OTHER; note = 2'-O-Methyl-uridine
  modified_base 95: mod_base = OTHER; note = 2'-O-Methyl-guanosine
  modified_base 96: mod_base = OTHER; note = 2'-O-Methyl-cytidine
  modified_base 97: mod_base = OTHER; note = 2'-O-Methyl-uridine
  modified_base 98: mod_base = OTHER; note = 2'-O-Methyl-uridine phosphorothioate
  modified_base 99: mod_base = OTHER; note = 2'-O-Methyl-uridine phosphorothioate
  modified_base 100: mod_base = OTHER; note = 2'-O-Methyl-uridine

SEQ ID NO: 2738 - RNA, 103 nt, synthetic construct; identical to SEQ ID NO: 1643
  source 1..103: mol_type = other RNA
  modified_base 1: mod_base = OTHER; note = 2'-O-Methyl-cytidine phosphorothioate
  modified_base 2: mod_base = OTHER; note = 2'-O-Methyl-cytidine phosphorothioate
  modified_base 3: mod_base = OTHER; note = 2'-O-Methyl-cytidine
  modified_base 21: mod_base = OTHER; note = 2'-O-Methyl-guanosine
  modified_base 25: mod_base = OTHER; note = uridine phosphorothioate
  modified_base 28: mod_base = OTHER; note = 2'-O-Methyl-adenosine
  modified_base 29: mod_base = OTHER; note = 2'-O-Methyl-guanosine
  modified_base 30: mod_base = OTHER; note = 2'-O-Methyl-cytidine
  modified_base 31: mod_base = OTHER; note = 2'-O-Methyl-uridine
  modified_base 32: mod_base = OTHER; note = 2'-O-Methyl-adenosine
  modified_base 34: mod_base = OTHER; note = 2'-O-Methyl-adenosine
  modified_base 35: mod_base = OTHER; note = 2'-O-Methyl-adenosine
  modified_base 36: mod_base = OTHER; note = 2'-O-Methyl-adenosine
  modified_base 37: mod_base = OTHER; note = 2'-O-Methyl-uridine
  modified_base 38: mod_base = OTHER; note = 2'-O-Methyl-adenosine
  modified_base 39: mod_base = OTHER; note = 2'-O-Methyl-guanosine
  modified_base 40: mod_base = OTHER; note = 2'-O-Methyl-cytidine
  modified_base 41: mod_base = OTHER; note = 2'-O-Methyl-adenosine
  modified_base 42: mod_base = OTHER; note = 2'-O-Methyl-adenosine
  modified_base 46: mod_base = OTHER; note = 2'-O-Methyl-adenosine
  modified_base 48: mod_base = OTHER; note = 2'-O-Methyl-adenosine
  modified_base 50: mod_base = OTHER; note = 2'-O-Methyl-uridine
  modified_base 52: mod_base = OTHER; note = 2'-O-Methyl-adenosine
  modified_base 53: mod_base = OTHER; note = 2'-O-Methyl-guanosine
  modified_base 54: mod_base = OTHER; note = 2'-O-Methyl-guanosine
  modified_base 55: mod_base = OTHER; note = 2'-O-Methyl-cytidine
  modified_base 56: mod_base = OTHER; note = 2'-O-Methyl-uridine
  modified_base 57: mod_base = OTHER; note = 2'-O-Methyl-adenosine
  modified_base 60: mod_base = OTHER; note = 2'-O-Methyl-cytidine
  modified_base 61: mod_base = OTHER; note = 2'-O-Methyl-cytidine
  modified_base 64: mod_base = OTHER; note = uridine phosphorothioate
  modified_base 66: mod_base = OTHER; note = 2'-O-Methyl-uridine
  modified_base 67: mod_base = OTHER; note = 2'-O-Methyl-cytidine
  modified_base 70: mod_base = OTHER; note = 2'-O-Methyl-cytidine
  modified_base 71: mod_base = OTHER; note = 2'-O-Methyl-uridine
  modified_base 72: mod_base = OTHER; note = 2'-O-Methyl-uridine
  modified_base 74: mod_base = OTHER; note = 2'-O-Methyl-adenosine
  modified_base 75: mod_base = OTHER; note = 2'-O-Methyl-adenosine
  modified_base 76: mod_base = OTHER; note = 2'-O-Methyl-adenosine
  modified_base 77: mod_base = OTHER; note = 2'-O-Methyl-adenosine
  modified_base 78: mod_base = OTHER; note = 2'-O-Methyl-adenosine
  modified_base 79: mod_base = OTHER; note = 2'-O-Methyl-guanosine
  modified_base 80: mod_base = OTHER; note = 2'-O-Methyl-uridine
  modified_base 81: mod_base = OTHER; note = 2'-O-Methyl-guanosine
  modified_base 83: mod_base = OTHER; note = 2'-O-Methyl-cytidine
  modified_base 84: mod_base = OTHER; note = 2'-O-Methyl-adenosine
  modified_base 85: mod_base = OTHER; note = 2'-O-Methyl-cytidine
  modified_base 86: mod_base = OTHER; note = 2'-O-Methyl-cytidine
  modified_base 87: mod_base = OTHER; note = 2'-O-Methyl-guanosine
  modified_base 88: mod_base = OTHER; note = 2'-O-Methyl-adenosine
  modified_base 89: mod_base = OTHER; note = 2'-O-Methyl-guanosine
  modified_base 90: mod_base = OTHER; note = 2'-O-Methyl-uridine
  modified_base 91: mod_base = OTHER; note = 2'-O-Methyl-cytidine
  modified_base 92: mod_base = OTHER; note = 2'-O-Methyl-guanosine
  modified_base 93: mod_base = OTHER; note = 2'-O-Methyl-guanosine
  modified_base 94: mod_base = OTHER; note = 2'-O-Methyl-uridine
  modified_base 95: mod_base = OTHER; note = 2'-O-Methyl-guanosine
  modified_base 96: mod_base = OTHER; note = 2'-O-Methyl-cytidine
  modified_base 97: mod_base = OTHER; note = 2'-O-Methyl-uridine
  modified_base 98: mod_base = OTHER; note = 2'-O-Methyl-uridine phosphorothioate
  modified_base 99: mod_base = OTHER; note = 2'-O-Methyl-uridine phosphorothioate
  modified_base 100: mod_base = OTHER; note = 2'-O-Methyl-uridine

SEQ ID NO: 2739 - RNA, 103 nt, synthetic construct; identical to SEQ ID NO: 1699
  source 1..103: mol_type = other RNA
  modified_base 1: mod_base = OTHER; note = 2'-O-Methyl-guanosine phosphorothioate
  modified_base 2: mod_base = OTHER; note = 2'-O-Methyl-adenosine phosphorothioate
  modified_base 3: mod_base = OTHER; note = 2'-O-Methyl-guanosine
  modified_base 21: mod_base = OTHER; note = 2'-O-Methyl-guanosine
  modified_base 25: mod_base = OTHER; note = uridine phosphorothioate
  modified_base 28: mod_base = OTHER; note = 2'-O-Methyl-adenosine
  modified_base 29: mod_base = OTHER; note = 2'-O-Methyl-guanosine
  modified_base 30: mod_base = OTHER; note = 2'-O-Methyl-cytidine
  modified_base 31: mod_base = OTHER; note = 2'-O-Methyl-uridine
  modified_base 32: mod_base = OTHER; note = 2'-O-Methyl-adenosine
  modified_base 33: mod_base = OTHER; note = 2'-O-Methyl-guanosine
  modified_base 34: mod_base = OTHER; note = 2'-O-Methyl-adenosine
  modified_base 35: mod_base = OTHER; note = 2'-O-Methyl-adenosine
  modified_base 36: mod_base = OTHER; note = 2'-O-Methyl-adenosine
  modified_base 37: mod_base = OTHER; note = 2'-O-Methyl-uridine
  modified_base 38: mod_base = OTHER; note = 2'-O-Methyl-adenosine
  modified_base 39: mod_base = OTHER; note = 2'-O-Methyl-guanosine
  modified_base 40: mod_base = OTHER; note = 2'-O-Methyl-cytidine
  modified_base 41: mod_base = OTHER; note = 2'-O-Methyl-adenosine
  modified_base 42: mod_base = OTHER; note = 2'-O-Methyl-adenosine
  modified_base 46: mod_base = OTHER; note = 2'-O-Methyl-adenosine
  modified_base 48: mod_base = OTHER; note = 2'-O-Methyl-adenosine
  modified_base 50: mod_base = OTHER; note = 2'-O-Methyl-uridine
  modified_base 52: mod_base = OTHER; note = 2'-O-Methyl-adenosine
  modified_base 53: mod_base = OTHER; note = 2'-O-Methyl-guanosine
  modified_base 54: mod_base = OTHER; note = 2'-O-Methyl-guanosine
  modified_base 55: mod_base = OTHER; note = 2'-O-Methyl-cytidine
  modified_base 56: mod_base = OTHER; note = 2'-O-Methyl-uridine
  modified_base 57: mod_base = OTHER; note = 2'-O-Methyl-adenosine
  modified_base 60: mod_base = OTHER; note = 2'-O-Methyl-cytidine
  modified_base 61: mod_base = OTHER; note = 2'-O-Methyl-cytidine
  modified_base 64: mod_base = OTHER; note = uridine phosphorothioate
  modified_base 66: mod_base = OTHER; note = 2'-O-Methyl-uridine
  modified_base 67: mod_base = OTHER; note = 2'-O-Methyl-cytidine
  modified_base 70: mod_base = OTHER; note = 2'-O-Methyl-cytidine
  modified_base 71: mod_base = OTHER; note = 2'-O-Methyl-uridine
  modified_base 72: mod_base = OTHER; note = 2'-O-Methyl-uridine
  modified_base 73: mod_base = OTHER; note = 2'-O-Methyl-guanosine
  modified_base 74: mod_base = OTHER; note = 2'-O-Methyl-adenosine
  modified_base 75: mod_base = OTHER; note = 2'-O-Methyl-adenosine
  modified_base 76: mod_base = OTHER; note = 2'-O-Methyl-adenosine
  modified_base 77: mod_base = OTHER; note = 2'-O-Methyl-adenosine
  modified_base 78: mod_base = OTHER; note = 2'-O-Methyl-adenosine
  modified_base 79: mod_base = OTHER; note = 2'-O-Methyl-guanosine
  modified_base 80: mod_base = OTHER; note = 2'-O-Methyl-uridine
  modified_base 81: mod_base = OTHER; note = 2'-O-Methyl-guanosine
  modified_base 83: mod_base = OTHER; note = 2'-O-Methyl-cytidine
  modified_base 84: mod_base = OTHER; note = 2'-O-Methyl-adenosine
  modified_base 85: mod_base = OTHER; note = 2'-O-Methyl-cytidine
  modified_base 86: mod_base = OTHER; note = 2'-O-Methyl-cytidine
  modified_base 87: mod_base = OTHER; note = 2'-O-Methyl-guanosine
  modified_base 88: mod_base = OTHER; note = 2'-O-Methyl-adenosine
  modified_base 89: mod_base = OTHER; note = 2'-O-Methyl-guanosine
  modified_base 90: mod_base = OTHER; note = 2'-O-Methyl-uridine
  modified_base 91: mod_base = OTHER; note = 2'-O-Methyl-cytidine
  modified_base 92: mod_base = OTHER; note = 2'-O-Methyl-guanosine
  modified_base 93: mod_base = OTHER; note = 2'-O-Methyl-guanosine
  modified_base 94: mod_base = OTHER; note = 2'-O-Methyl-uridine
  modified_base 95: mod_base = OTHER; note = 2'-O-Methyl-guanosine
  modified_base 96: mod_base = OTHER; note = 2'-O-Methyl-cytidine
  modified_base 97: mod_base = OTHER; note = 2'-O-Methyl-uridine
  modified_base 98: mod_base = OTHER; note = 2'-O-Methyl-uridine phosphorothioate
  modified_base 99: mod_base = OTHER; note = 2'-O-Methyl-uridine phosphorothioate
  modified_base 100: mod_base = OTHER; note = 2'-O-Methyl-uridine

SEQ ID NO: 2740 - RNA, 103 nt, synthetic construct; identical to SEQ ID NO: 1699
  source 1..103: mol_type = other RNA
  modified_base 1: mod_base = OTHER; note = 2'-O-Methyl-guanosine phosphorothioate
  modified_base 2: mod_base = OTHER; note = 2'-O-Methyl-adenosine phosphorothioate
  modified_base 3: mod_base = OTHER; note = 2'-O-Methyl-guanosine
  modified_base 21: mod_base = OTHER; note = 2'-O-Methyl-guanosine
  modified_base 25: mod_base = OTHER; note = uridine phosphorothioate
  modified_base 28: mod_base = OTHER; note = 2'-O-Methyl-adenosine
  modified_base 29: mod_base = OTHER; note = 2'-O-Methyl-guanosine
  modified_base 30: mod_base = OTHER; note = 2'-O-Methyl-cytidine
  modified_base 31: mod_base = OTHER; note = 2'-O-Methyl-uridine
  modified_base 32: mod_base = OTHER; note = 2'-O-Methyl-adenosine
  modified_base 34: mod_base = OTHER; note = 2'-O-Methyl-adenosine
  modified_base 35: mod_base = OTHER; note = 2'-O-Methyl-adenosine
  modified_base 36: mod_base = OTHER; note = 2'-O-Methyl-adenosine
  modified_base 37: mod_base = OTHER; note = 2'-O-Methyl-uridine
  modified_base 38: mod_base = OTHER; note = 2'-O-Methyl-adenosine
  modified_base 39: mod_base = OTHER; note = 2'-O-Methyl-guanosine
  modified_base 40: mod_base = OTHER; note = 2'-O-Methyl-cytidine
  modified_base 41: mod_base = OTHER; note = 2'-O-Methyl-adenosine
  modified_base 42: mod_base = OTHER; note = 2'-O-Methyl-adenosine
  modified_base 46: mod_base = OTHER; note = 2'-O-Methyl-adenosine
  modified_base 48: mod_base = OTHER; note = 2'-O-Methyl-adenosine
  modified_base 50: mod_base = OTHER; note = 2'-O-Methyl-uridine
  modified_base 52: mod_base = OTHER; note = 2'-O-Methyl-adenosine
  modified_base 53: mod_base = OTHER; note = 2'-O-Methyl-guanosine
  modified_base 54: mod_base = OTHER; note = 2'-O-Methyl-guanosine
  modified_base 55: mod_base = OTHER; note = 2'-O-Methyl-cytidine
  modified_base 56: mod_base = OTHER; note = 2'-O-Methyl-uridine
  modified_base 57: mod_base = OTHER; note = 2'-O-Methyl-adenosine
  modified_base 60: mod_base = OTHER; note = 2'-O-Methyl-cytidine
  modified_base 61: mod_base = OTHER; note = 2'-O-Methyl-cytidine
  modified_base 64: mod_base = OTHER; note = uridine phosphorothioate
  modified_base 66: mod_base = OTHER; note = 2'-O-Methyl-uridine
  modified_base 67: mod_base = OTHER; note = 2'-O-Methyl-cytidine
  modified_base 70: mod_base = OTHER; note = 2'-O-Methyl-cytidine
  modified_base 71: mod_base = OTHER; note = 2'-O-Methyl-uridine
  modified_base 72: mod_base = OTHER; note = 2'-O-Methyl-uridine
  modified_base 74: mod_base = OTHER; note = 2'-O-Methyl-adenosine
  modified_base 75: mod_base = OTHER; note = 2'-O-Methyl-adenosine
  modified_base 76: mod_base = OTHER; note = 2'-O-Methyl-adenosine
  modified_base 77: mod_base = OTHER; note = 2'-O-Methyl-adenosine
  modified_base 78: mod_base = OTHER; note = 2'-O-Methyl-adenosine
  modified_base 79: mod_base = OTHER; note = 2'-O-Methyl-guanosine
  modified_base 80: mod_base = OTHER; note = 2'-O-Methyl-uridine
  modified_base 81: mod_base = OTHER; note = 2'-O-Methyl-guanosine
  modified_base 83: mod_base = OTHER; note = 2'-O-Methyl-cytidine
  modified_base 84: mod_base = OTHER; note = 2'-O-Methyl-adenosine
  modified_base 85: mod_base = OTHER; note = 2'-O-Methyl-cytidine
  modified_base 86: mod_base = OTHER; note = 2'-O-Methyl-cytidine
  modified_base 87: mod_base = OTHER; note = 2'-O-Methyl-guanosine
  modified_base 88: mod_base = OTHER; note = 2'-O-Methyl-adenosine
  modified_base 89: mod_base = OTHER; note = 2'-O-Methyl-guanosine
  modified_base 90: mod_base = OTHER; note = 2'-O-Methyl-uridine
  modified_base 91: mod_base = OTHER; note = 2'-O-Methyl-cytidine
  modified_base 92: mod_base = OTHER; note = 2'-O-Methyl-guanosine
  modified_base 93: mod_base = OTHER; note = 2'-O-Methyl-guanosine
  modified_base 94: mod_base = OTHER; note = 2'-O-Methyl-uridine
  modified_base 95: mod_base = OTHER; note = 2'-O-Methyl-guanosine
  modified_base 96: mod_base = OTHER; note = 2'-O-Methyl-cytidine
  modified_base 97: mod_base = OTHER; note = 2'-O-Methyl-uridine
  modified_base 98: mod_base = OTHER; note = 2'-O-Methyl-uridine phosphorothioate
  modified_base 99: mod_base = OTHER; note = 2'-O-Methyl-uridine phosphorothioate
  modified_base 100: mod_base = OTHER; note = 2'-O-Methyl-uridine

SEQ ID NO: 2741 - RNA, 103 nt, synthetic construct; identical to SEQ ID NO: 1700
  source 1..103: mol_type = other RNA
  modified_base 1: mod_base = OTHER; note = 2'-O-Methyl-cytidine phosphorothioate
  modified_base 2: mod_base = OTHER; note = 2'-O-Methyl-adenosine phosphorothioate
  modified_base 3: mod_base = OTHER; note = 2'-O-Methyl-guanosine
  modified_base 21: mod_base = OTHER; note = 2'-O-Methyl-guanosine
  modified_base 25: mod_base = OTHER; note = uridine phosphorothioate
  modified_base 28: mod_base = OTHER; note = 2'-O-Methyl-adenosine
  modified_base 29: mod_base = OTHER; note = 2'-O-Methyl-guanosine
  modified_base 30: mod_base = OTHER; note = 2'-O-Methyl-cytidine
  modified_base 31: mod_base = OTHER; note = 2'-O-Methyl-uridine
  modified_base 32: mod_base = OTHER; note = 2'-O-Methyl-adenosine
  modified_base 33: mod_base = OTHER; note = 2'-O-Methyl-guanosine
  modified_base 34: mod_base = OTHER; note = 2'-O-Methyl-adenosine
  modified_base 35: mod_base = OTHER; note = 2'-O-Methyl-adenosine
  modified_base 36: mod_base = OTHER; note = 2'-O-Methyl-adenosine
  modified_base 37: mod_base = OTHER; note = 2'-O-Methyl-uridine
  modified_base 38: mod_base = OTHER; note = 2'-O-Methyl-adenosine
  modified_base 39: mod_base = OTHER; note = 2'-O-Methyl-guanosine
  modified_base 40: mod_base = OTHER; note = 2'-O-Methyl-cytidine
  modified_base 41: mod_base = OTHER; note = 2'-O-Methyl-adenosine
  modified_base 42: mod_base = OTHER; note = 2'-O-Methyl-adenosine
  modified_base 46: mod_base = OTHER; note = 2'-O-Methyl-adenosine
  modified_base 48: mod_base = OTHER; note = 2'-O-Methyl-adenosine
  modified_base 50: mod_base = OTHER; note = 2'-O-Methyl-uridine
  modified_base 52: mod_base = OTHER; note = 2'-O-Methyl-adenosine
  modified_base 53: mod_base = OTHER; note = 2'-O-Methyl-guanosine
  modified_base 54: mod_base = OTHER; note = 2'-O-Methyl-guanosine
  modified_base 57: mod_base = OTHER; note = 2'-O-Methyl-adenosine
  modified_base 61: mod_base = OTHER; note = 2'-O-Methyl-cytidine
  modified_base 64: mod_base = OTHER; note = uridine phosphorothioate
  modified_base 66: mod_base = OTHER; note = 2'-O-Methyl-uridine
  modified_base 67: mod_base = OTHER; note = 2'-O-Methyl-cytidine
  modified_base 70: mod_base = OTHER; note = 2'-O-Methyl-cytidine
  modified_base 71: mod_base = OTHER; note = 2'-O-Methyl-uridine
  modified_base 72: mod_base = OTHER; note = 2'-O-Methyl-uridine
  modified_base 74: mod_base = OTHER; note = 2'-O-Methyl-adenosine
  modified_base 75: mod_base = OTHER; note = 2'-O-Methyl-adenosine
  modified_base 76: mod_base = OTHER; note = 2'-O-Methyl-adenosine
  modified_base 77: mod_base = OTHER; note = 2'-O-Methyl-adenosine
  modified_base 78: mod_base = OTHER; note = 2'-O-Methyl-adenosine
  modified_base 79: mod_base = OTHER; note = 2'-O-Methyl-guanosine
  modified_base 80: mod_base = OTHER; note = 2'-O-Methyl-uridine
  modified_base 82: mod_base = OTHER; note = 2'-O-Methyl-guanosine
  modified_base 83: mod_base = OTHER; note = 2'-O-Methyl-cytidine
  modified_base 84: mod_base = OTHER; note = 2'-O-Methyl-adenosine
  modified_base 85: mod_base = OTHER; note = 2'-O-Methyl-cytidine
  modified_base 86: mod_base = OTHER; note = 2'-O-Methyl-cytidine
  modified_base 87: mod_base = OTHER; note = 2'-O-Methyl-guanosine
  modified_base 89: mod_base = OTHER; note = 2'-O-Methyl-guanosine
  modified_base 92: mod_base = OTHER; note = 2'-O-Methyl-guanosine
  modified_base 93: mod_base = OTHER; note = 2'-O-Methyl-guanosine
  modified_base 94: mod_base = OTHER; note = 2'-O-Methyl-uridine
  modified_base 95: mod_base = OTHER; note = 2'-O-Methyl-guanosine
  modified_base 96: mod_base = OTHER; note = 2'-O-Methyl-cytidine
  modified_base 97: mod_base = OTHER; note = 2'-O-Methyl-uridine
  modified_base 98: mod_base = OTHER; note = 2'-O-Methyl-uridine phosphorothioate
  modified_base 99: mod_base = OTHER; note = 2'-O-Methyl-uridine phosphorothioate
  modified_base 100: mod_base = OTHER; note = 2'-O-Methyl-uridine

SEQ ID NO: 2742 - RNA, 103 nt, synthetic construct; identical to SEQ ID NO: 1700
  source 1..103: mol_type = other RNA
  modified_base 1: mod_base = OTHER; note = 2'-O-Methyl-cytidine phosphorothioate
  modified_base 2: mod_base = OTHER; note = 2'-O-Methyl-adenosine phosphorothioate
  modified_base 3: mod_base = OTHER; note = 2'-O-Methyl-guanosine
  modified_base 21: mod_base = OTHER; note = 2'-O-Methyl-guanosine
  modified_base 25: mod_base = OTHER; note = uridine phosphorothioate
  modified_base 28: mod_base = OTHER; note = 2'-O-Methyl-adenosine
  modified_base 29: mod_base = OTHER; note = 2'-O-Methyl-guanosine
  modified_base 30: mod_base = OTHER; note = 2'-O-Methyl-cytidine
  modified_base 31: mod_base = OTHER; note = 2'-O-Methyl-uridine
  modified_base 32: mod_base = OTHER; note = 2'-O-Methyl-adenosine
  modified_base 33: mod_base = OTHER; note = 2'-O-Methyl-guanosine
  modified_base 34: mod_base = OTHER; note = 2'-O-Methyl-adenosine
  modified_base 35: mod_base = OTHER; note = 2'-O-Methyl-adenosine
  modified_base 36: mod_base = OTHER; note = 2'-O-Methyl-adenosine
  modified_base 37: mod_base = OTHER; note = 2'-O-Methyl-uridine
  modified_base 38: mod_base = OTHER; note = 2'-O-Methyl-adenosine
  modified_base 39: mod_base = OTHER; note = 2'-O-Methyl-guanosine
  modified_base 40: mod_base = OTHER; note = 2'-O-Methyl-cytidine
  modified_base 41: mod_base = OTHER; note = 2'-O-Methyl-adenosine
  modified_base 42: mod_base = OTHER; note = 2'-O-Methyl-adenosine
  modified_base 46: mod_base = OTHER; note = 2'-O-Methyl-adenosine
  modified_base 48: mod_base = OTHER; note = 2'-O-Methyl-adenosine
  modified_base 50: mod_base = OTHER; note = 2'-O-Methyl-uridine
  modified_base 52: mod_base = OTHER; note = 2'-O-Methyl-adenosine
  modified_base 53: mod_base = OTHER; note = 2'-O-Methyl-guanosine
  modified_base 54: mod_base = OTHER; note = 2'-O-Methyl-guanosine
  modified_base 55: mod_base = OTHER; note = 2'-O-Methyl-cytidine
  modified_base 56: mod_base = OTHER; note = 2'-O-Methyl-uridine
  modified_base 57: mod_base = OTHER; note = 2'-O-Methyl-adenosine
  modified_base 60: mod_base = OTHER; note = 2'-O-Methyl-cytidine
  modified_base 61: mod_base = OTHER; note = 2'-O-Methyl-cytidine
  modified_base 64: mod_base = OTHER; note = uridine phosphorothioate
  modified_base 66: mod_base = OTHER; note = 2'-O-Methyl-uridine
  modified_base 67: mod_base = OTHER; note = 2'-O-Methyl-cytidine
  modified_base 70: mod_base = OTHER; note = 2'-O-Methyl-cytidine
  modified_base 71: mod_base = OTHER; note = 2'-O-Methyl-uridine
  modified_base 72: mod_base = OTHER; note = 2'-O-Methyl-uridine
  modified_base 74: mod_base = OTHER; note = 2'-O-Methyl-adenosine
  modified_base 75: mod_base = OTHER; note = 2'-O-Methyl-adenosine
  modified_base 76: mod_base = OTHER; note = 2'-O-Methyl-adenosine
  modified_base 77: mod_base = OTHER; note = 2'-O-Methyl-adenosine
  modified_base 78: mod_base = OTHER; note = 2'-O-Methyl-adenosine
  modified_base 79: mod_base = OTHER; note = 2'-O-Methyl-guanosine
  modified_base 80: mod_base = OTHER; note = 2'-O-Methyl-uridine
  modified_base 82: mod_base = OTHER; note = 2'-O-Methyl-guanosine
  modified_base 83: mod_base = OTHER; note = 2'-O-Methyl-cytidine
  modified_base 84: mod_base = OTHER; note = 2'-O-Methyl-adenosine
  modified_base 85: mod_base = OTHER; note = 2'-O-Methyl-cytidine
  modified_base 86: mod_base = OTHER; note = 2'-O-Methyl-cytidine
  modified_base 87: mod_base = OTHER; note = 2'-O-Methyl-guanosine
  modified_base 89: mod_base = OTHER; note = 2'-O-Methyl-guanosine
  modified_base 92: mod_base = OTHER; note = 2'-O-Methyl-guanosine
  modified_base 93: mod_base = OTHER; note = 2'-O-Methyl-guanosine
  modified_base 94: mod_base = OTHER; note = 2'-O-Methyl-uridine
  modified_base 95: mod_base = OTHER; note = 2'-O-Methyl-guanosine
  modified_base 96: mod_base = OTHER; note = 2'-O-Methyl-cytidine
  modified_base 97: mod_base = OTHER; note = 2'-O-Methyl-uridine
  modified_base 98: mod_base = OTHER; note = 2'-O-Methyl-uridine phosphorothioate
  modified_base 99: mod_base = OTHER; note = 2'-O-Methyl-uridine phosphorothioate
  modified_base 100: mod_base = OTHER; note = 2'-O-Methyl-uridine

SEQ ID NO: 2743 - RNA, 103 nt, synthetic construct; identical to SEQ ID NO: 1700
  source 1..103: mol_type = other RNA
  modified_base 1: mod_base = OTHER; note = 2'-O-Methyl-cytidine phosphorothioate
  modified_base 2: mod_base = OTHER; note = 2'-O-Methyl-adenosine phosphorothioate
  modified_base 3: mod_base = OTHER; note = 2'-O-Methyl-guanosine
  modified_base 21: mod_base = OTHER; note = 2'-O-Methyl-guanosine
  modified_base 25: mod_base = OTHER; note = uridine phosphorothioate
  modified_base 28: mod_base = OTHER; note = 2'-O-Methyl-adenosine
  modified_base 29: mod_base = OTHER; note = 2'-O-Methyl-guanosine
  modified_base 30: mod_base = OTHER; note = 2'-O-Methyl-cytidine
  modified_base 31: mod_base = OTHER; note = 2'-O-Methyl-uridine
  modified_base 32: mod_base = OTHER; note = 2'-O-Methyl-adenosine
  modified_base 33: mod_base = OTHER; note = 2'-O-Methyl-guanosine
  modified_base 34: mod_base = OTHER; note = 2'-O-Methyl-adenosine
  modified_base 35: mod_base = OTHER; note = 2'-O-Methyl-adenosine
  modified_base 36: mod_base = OTHER; note = 2'-O-Methyl-adenosine
  modified_base 37: mod_base = OTHER; note = 2'-O-Methyl-uridine
  modified_base 38: mod_base = OTHER; note = 2'-O-Methyl-adenosine
  modified_base 39: mod_base = OTHER; note = 2'-O-Methyl-guanosine
  modified_base 40: mod_base = OTHER; note = 2'-O-Methyl-cytidine
  modified_base 41: mod_base = OTHER; note = 2'-O-Methyl-adenosine
  modified_base 42: mod_base = OTHER; note = 2'-O-Methyl-adenosine
  modified_base 46: mod_base = OTHER; note = 2'-O-Methyl-adenosine
  modified_base 48: mod_base = OTHER; note = 2'-O-Methyl-adenosine
  modified_base 50: mod_base = OTHER; note = 2'-O-Methyl-uridine
  modified_base 52: mod_base = OTHER; note = 2'-O-Methyl-adenosine
  modified_base 53: mod_base = OTHER; note = 2'-O-Methyl-guanosine
  modified_base 54: mod_base = OTHER; note = 2'-O-Methyl-guanosine
  modified_base 57: mod_base = OTHER; note = 2'-O-Methyl-adenosine
  modified_base 61: mod_base = OTHER; note = 2'-O-Methyl-cytidine
  modified_base 64: mod_base = OTHER; note = uridine phosphorothioate
  modified_base 66: mod_base = OTHER; note = 2'-O-Methyl-uridine
  modified_base 67: mod_base = OTHER; note = 2'-O-Methyl-cytidine
  modified_base 70: mod_base = OTHER; note = 2'-O-Methyl-cytidine
  modified_base 71: mod_base = OTHER; note = 2'-O-Methyl-uridine
  modified_base 72: mod_base = OTHER; note = 2'-O-Methyl-uridine
  modified_base 73: mod_base = OTHER; note = 2'-O-Methyl-guanosine
  modified_base 74: mod_base = OTHER; note = 2'-O-Methyl-adenosine
  modified_base 75: mod_base = OTHER; note = 2'-O-Methyl-adenosine
  modified_base 76: mod_base = OTHER; note = 2'-O-Methyl-adenosine
  modified_base 77: mod_base = OTHER; note = 2'-O-Methyl-adenosine
  modified_base 78: mod_base = OTHER; note = 2'-O-Methyl-adenosine
  modified_base 79: mod_base = OTHER; note = 2'-O-Methyl-guanosine
  modified_base 80: mod_base = OTHER; note = 2'-O-Methyl-uridine
  modified_base 82: mod_base = OTHER; note = 2'-O-Methyl-guanosine
  modified_base 83: mod_base = OTHER; note = 2'-O-Methyl-cytidine
  modified_base 84: mod_base = OTHER; note = 2'-O-Methyl-adenosine
  modified_base 85: mod_base = OTHER; note = 2'-O-Methyl-cytidine
  modified_base 86: mod_base = OTHER; note = 2'-O-Methyl-cytidine
  modified_base 87: mod_base = OTHER; note = 2'-O-Methyl-guanosine
  modified_base 89: mod_base = OTHER; note = 2'-O-Methyl-guanosine
  modified_base 92: mod_base = OTHER; note = 2'-O-Methyl-guanosine
  modified_base 93: mod_base = OTHER; note = 2'-O-Methyl-guanosine
  modified_base 94: mod_base = OTHER; note = 2'-O-Methyl-uridine
  modified_base 95: mod_base = OTHER; note = 2'-O-Methyl-guanosine
  modified_base 96: mod_base = OTHER; note = 2'-O-Methyl-cytidine
  modified_base 97: mod_base = OTHER; note = 2'-O-Methyl-uridine
  modified_base 98: mod_base = OTHER; note = 2'-O-Methyl-uridine phosphorothioate
  modified_base 99: mod_base = OTHER; note = 2'-O-Methyl-uridine phosphorothioate
  modified_base 100: mod_base = OTHER; note = 2'-O-Methyl-uridine

SEQ ID NO: 2744 - RNA, 103 nt, synthetic construct; identical to SEQ ID NO: 1700
  source 1..103: mol_type = other RNA
  modified_base 1: mod_base = OTHER; note = 2'-O-Methyl-cytidine phosphorothioate
  modified_base 2: mod_base = OTHER; note = 2'-O-Methyl-adenosine phosphorothioate
  modified_base 3: mod_base = OTHER; note = 2'-O-Methyl-guanosine
  modified_base 21: mod_base = OTHER; note = 2'-O-Methyl-guanosine
  modified_base 25: mod_base = OTHER; note = uridine phosphorothioate
  modified_base 28: mod_base = OTHER; note = 2'-O-Methyl-adenosine
  modified_base 29: mod_base = OTHER; note = 2'-O-Methyl-guanosine
  modified_base 30: mod_base = OTHER; note = 2'-O-Methyl-cytidine
  modified_base 31: mod_base = OTHER; note = 2'-O-Methyl-uridine
  modified_base 32: mod_base = OTHER; note = 2'-O-Methyl-adenosine
  modified_base 33: mod_base = OTHER; note = 2'-O-Methyl-guanosine
  modified_base 34: mod_base = OTHER; note = 2'-O-Methyl-adenosine
  modified_base 35: mod_base = OTHER; note = 2'-O-Methyl-adenosine
  modified_base 36: mod_base = OTHER; note = 2'-O-Methyl-adenosine
  modified_base 37: mod_base = OTHER; note = 2'-O-Methyl-uridine
  modified_base 38: mod_base = OTHER; note = 2'-O-Methyl-adenosine
  modified_base 39: mod_base = OTHER; note = 2'-O-Methyl-guanosine
  modified_base 40: mod_base = OTHER; note = 2'-O-Methyl-cytidine
  modified_base 41: mod_base = OTHER; note = 2'-O-Methyl-adenosine
  modified_base 42: mod_base = OTHER; note = 2'-O-Methyl-adenosine
  modified_base 46: mod_base = OTHER; note = 2'-O-Methyl-adenosine
  modified_base 48: mod_base = OTHER; note = 2'-O-Methyl-adenosine
  modified_base 50: mod_base = OTHER; note = 2'-O-Methyl-uridine
  modified_base 52: mod_base = OTHER; note = 2'-O-Methyl-adenosine
  modified_base 53: mod_base = OTHER; note = 2'-O-Methyl-guanosine
  modified_base 54: mod_base = OTHER; note = 2'-O-Methyl-guanosine
  modified_base 57: mod_base = OTHER; note = 2'-O-Methyl-adenosine
  modified_base 61: mod_base = OTHER; note = 2'-O-Methyl-cytidine
  modified_base 64: mod_base = OTHER; note = uridine phosphorothioate
  modified_base 66: mod_base = OTHER; note = 2'-O-Methyl-uridine
  modified_base 67: mod_base = OTHER; note = 2'-O-Methyl-cytidine
  modified_base 70: mod_base = OTHER; note = 2'-O-Methyl-cytidine
  modified_base 71: mod_base = OTHER; note = 2'-O-Methyl-uridine
  modified_base 72: mod_base = OTHER; note = 2'-O-Methyl-uridine
  modified_base 73: mod_base = OTHER; note = 2'-O-Methyl-guanosine
  modified_base 74: mod_base = OTHER; note = 2'-O-Methyl-adenosine
  modified_base 75: mod_base = OTHER; note = 2'-O-Methyl-adenosine
  modified_base 76: mod_base = OTHER; note = 2'-O-Methyl-adenosine
  modified_base 77: mod_base = OTHER; note = 2'-O-Methyl-adenosine
  modified_base 78: mod_base = OTHER; note = 2'-O-Methyl-adenosine
  modified_base 79: mod_base = OTHER; note = 2'-O-Methyl-guanosine
  modified_base 80: mod_base = OTHER; note = 2'-O-Methyl-uridine
  modified_base 82: mod_base = OTHER; note = 2'-O-Methyl-guanosine
  modified_base 83: mod_base = OTHER; note = 2'-O-Methyl-cytidine
  modified_base 84: mod_base = OTHER; note = 2'-O-Methyl-adenosine
  modified_base 85: mod_base = OTHER; note = 2'-O-Methyl-cytidine
  modified_base 86: mod_base = OTHER; note = 2'-O-Methyl-cytidine
  modified_base 87: mod_base = OTHER; note = 2'-O-Methyl-guanosine
  modified_base 89: mod_base = OTHER; note = 2'-O-Methyl-guanosine
  modified_base 91: mod_base = OTHER; note = 2'-O-Methyl-cytidine
  modified_base 92: mod_base = OTHER; note = 2'-O-Methyl-guanosine
  modified_base 93: mod_base = OTHER; note = 2'-O-Methyl-guanosine
  modified_base 94: mod_base = OTHER; note = 2'-O-Methyl-uridine
  modified_base 95: mod_base = OTHER; note = 2'-O-Methyl-guanosine
  modified_base 96: mod_base = OTHER; note = 2'-O-Methyl-cytidine
  modified_base 97: mod_base = OTHER; note = 2'-O-Methyl-uridine
  modified_base 98: mod_base = OTHER; note = 2'-O-Methyl-uridine phosphorothioate
  modified_base 99: mod_base = OTHER; note = 2'-O-Methyl-uridine phosphorothioate
  modified_base 100: mod_base = OTHER; note = 2'-O-Methyl-uridine

SEQ ID NO: 2745 - RNA, 103 nt, synthetic construct; identical to SEQ ID NO: 1700
  source 1..103: mol_type = other RNA
  modified_base 1: mod_base = OTHER; note = 2'-O-Methyl-cytidine phosphorothioate
  modified_base 2: mod_base = OTHER; note = 2'-O-Methyl-adenosine phosphorothioate
  modified_base 3: mod_base = OTHER; note = 2'-O-Methyl-guanosine
  modified_base 21: mod_base = OTHER; note = 2'-O-Methyl-guanosine
  modified_base 25: mod_base = OTHER; note = uridine phosphorothioate
  modified_base 28: mod_base = OTHER; note = 2'-O-Methyl-adenosine
  modified_base 29: mod_base = OTHER; note = 2'-O-Methyl-guanosine
  modified_base 30: mod_base = OTHER; note = 2'-O-Methyl-cytidine
  modified_base 31: mod_base = OTHER; note = 2'-O-Methyl-uridine
  modified_base 32: mod_base = OTHER; note = 2'-O-Methyl-adenosine
  modified_base 34: mod_base = OTHER; note = 2'-O-Methyl-adenosine
  modified_base 35: mod_base = OTHER; note = 2'-O-Methyl-adenosine
  modified_base 36: mod_base = OTHER; note = 2'-O-Methyl-adenosine
  modified_base 37: mod_base = OTHER; note = 2'-O-Methyl-uridine
  modified_base 38: mod_base = OTHER; note = 2'-O-Methyl-adenosine
  modified_base 39: mod_base = OTHER; note = 2'-O-Methyl-guanosine
  modified_base 40: mod_base = OTHER; note = 2'-O-Methyl-cytidine
  modified_base 41: mod_base = OTHER; note = 2'-O-Methyl-adenosine
  modified_base 42: mod_base = OTHER; note = 2'-O-Methyl-adenosine
  modified_base 46: mod_base = OTHER; note = 2'-O-Methyl-adenosine
  modified_base 48: mod_base = OTHER; note = 2'-O-Methyl-adenosine
  modified_base 50: mod_base = OTHER; note = 2'-O-Methyl-uridine
  modified_base 52: mod_base = OTHER; note = 2'-O-Methyl-adenosine
  modified_base 53: mod_base = OTHER; note = 2'-O-Methyl-guanosine
  modified_base 54: mod_base = OTHER; note = 2'-O-Methyl-guanosine
  modified_base 57: mod_base = OTHER; note = 2'-O-Methyl-adenosine
  modified_base 61: mod_base = OTHER; note = 2'-O-Methyl-cytidine
  modified_base 64: mod_base = OTHER; note = uridine phosphorothioate
  modified_base 66: mod_base = OTHER; note = 2'-O-Methyl-uridine
  modified_base 67: mod_base = OTHER; note = 2'-O-Methyl-cytidine
  modified_base 70: mod_base = OTHER; note = 2'-O-Methyl-cytidine
  modified_base 71: mod_base = OTHER; note = 2'-O-Methyl-uridine
  modified_base 72: mod_base = OTHER; note = 2'-O-Methyl-uridine
  modified_base 73: mod_base = OTHER; note = 2'-O-Methyl-guanosine
  modified_base 74: mod_base = OTHER; note = 2'-O-Methyl-adenosine
  modified_base 75: mod_base = OTHER; note = 2'-O-Methyl-adenosine
  modified_base 76: mod_base = OTHER; note = 2'-O-Methyl-adenosine
  modified_base 77: mod_base = OTHER; note = 2'-O-Methyl-adenosine
  modified_base 78: mod_base = OTHER; note = 2'-O-Methyl-adenosine
  modified_base 79: mod_base = OTHER; note = 2'-O-Methyl-guanosine
  modified_base 80: mod_base = OTHER; note = 2'-O-Methyl-uridine
  modified_base 82: mod_base = OTHER; note = 2'-O-Methyl-guanosine
  modified_base 83: mod_base = OTHER; note = 2'-O-Methyl-cytidine
  modified_base 84: mod_base = OTHER; note = 2'-O-Methyl-adenosine
  modified_base 85: mod_base = OTHER; note = 2'-O-Methyl-cytidine
  modified_base 86: mod_base = OTHER; note = 2'-O-Methyl-cytidine
  modified_base 87: mod_base = OTHER; note = 2'-O-Methyl-guanosine
  modified_base 89: mod_base = OTHER; note = 2'-O-Methyl-guanosine
  modified_base 92: mod_base = OTHER; note = 2'-O-Methyl-guanosine
  modified_base 93: mod_base = OTHER; note = 2'-O-Methyl-guanosine
  modified_base 94: mod_base = OTHER; note = 2'-O-Methyl-uridine
  modified_base 95: mod_base = OTHER; note = 2'-O-Methyl-guanosine
  modified_base 96: mod_base = OTHER; note = 2'-O-Methyl-cytidine
  modified_base 97: mod_base = OTHER; note = 2'-O-Methyl-uridine
  modified_base 98: mod_base = OTHER; note = 2'-O-Methyl-uridine phosphorothioate
  modified_base 99: mod_base = OTHER; note = 2'-O-Methyl-uridine phosphorothioate
  modified_base 100: mod_base = OTHER; note = 2'-O-Methyl-uridine

SEQ ID NO: 2746 - RNA, 103 nt, synthetic construct; identical to SEQ ID NO: 1700
  source 1..103: mol_type = other RNA
  modified_base 1: mod_base = OTHER; note = 2'-O-Methyl-cytidine phosphorothioate
  modified_base 2: mod_base = OTHER; note = 2'-O-Methyl-adenosine phosphorothioate
  modified_base 3: mod_base = OTHER; note = 2'-O-Methyl-guanosine
  modified_base 21: mod_base = OTHER; note = 2'-O-Methyl-guanosine
  modified_base 25: mod_base = OTHER; note = uridine phosphorothioate
  modified_base 28: mod_base = OTHER; note = 2'-O-Methyl-adenosine
  modified_base 29: mod_base = OTHER; note = 2'-O-Methyl-guanosine
  modified_base 30: mod_base = OTHER; note = 2'-O-Methyl-cytidine
  modified_base 31: mod_base = OTHER; note = 2'-O-Methyl-uridine
  modified_base 32: mod_base = OTHER; note = 2'-O-Methyl-adenosine
  modified_base 34: mod_base = OTHER; note = 2'-O-Methyl-adenosine
  modified_base 35: mod_base = OTHER; note = 2'-O-Methyl-adenosine
  modified_base 36: mod_base = OTHER; note = 2'-O-Methyl-adenosine
  modified_base 37: mod_base = OTHER; note = 2'-O-Methyl-uridine
  modified_base 38: mod_base = OTHER; note = 2'-O-Methyl-adenosine
  modified_base 39: mod_base = OTHER; note = 2'-O-Methyl-guanosine
  modified_base 40: mod_base = OTHER; note = 2'-O-Methyl-cytidine
  modified_base 41: mod_base = OTHER; note = 2'-O-Methyl-adenosine
  modified_base 42: mod_base = OTHER; note = 2'-O-Methyl-adenosine
  modified_base 46: mod_base = OTHER; note = 2'-O-Methyl-adenosine
  modified_base 48: mod_base = OTHER; note = 2'-O-Methyl-adenosine
  modified_base 50: mod_base = OTHER; note = 2'-O-Methyl-uridine
  modified_base 52: mod_base = OTHER; note = 2'-O-Methyl-adenosine
  modified_base 53: mod_base = OTHER; note = 2'-O-Methyl-guanosine
  modified_base 54: mod_base = OTHER; note = 2'-O-Methyl-guanosine
  modified_base 57: mod_base = OTHER; note = 2'-O-Methyl-adenosine
  modified_base 61: mod_base = OTHER; note = 2'-O-Methyl-cytidine
  modified_base 64: mod_base = OTHER; note = uridine phosphorothioate
  modified_base 66: mod_base = OTHER; note = 2'-O-Methyl-uridine
  modified_base 67: mod_base = OTHER; note = 2'-O-Methyl-cytidine
  modified_base 70: mod_base = OTHER; note = 2'-O-Methyl-cytidine
  modified_base 71: mod_base = OTHER; note = 2'-O-Methyl-uridine
  modified_base 72: mod_base = OTHER; note = 2'-O-Methyl-uridine
  modified_base 73: mod_base = OTHER; note = 2'-O-Methyl-guanosine
  modified_base 74: mod_base = OTHER; note = 2'-O-Methyl-adenosine
  modified_base 75: mod_base = OTHER; note = 2'-O-Methyl-adenosine
  modified_base 76: mod_base = OTHER; note = 2'-O-Methyl-adenosine
  modified_base 77: mod_base = OTHER; note = 2'-O-Methyl-adenosine
  modified_base 78: mod_base = OTHER; note = 2'-O-Methyl-adenosine
  modified_base 79: mod_base = OTHER; note = 2'-O-Methyl-guanosine
  modified_base 80: mod_base = OTHER; note = 2'-O-Methyl-uridine
  modified_base 82: mod_base = OTHER; note = 2'-O-Methyl-guanosine
  modified_base 83: mod_base = OTHER; note = 2'-O-Methyl-cytidine
  modified_base 84: mod_base = OTHER; note = 2'-O-Methyl-adenosine
  modified_base 85: mod_base = OTHER; note = 2'-O-Methyl-cytidine
  modified_base 86: mod_base = OTHER; note = 2'-O-Methyl-cytidine
  modified_base 87: mod_base = OTHER; note = 2'-O-Methyl-guanosine
  modified_base 89: mod_base = OTHER; note = 2'-O-Methyl-guanosine
  modified_base 91: mod_base = OTHER; note = 2'-O-Methyl-cytidine
  modified_base 92: mod_base = OTHER; note = 2'-O-Methyl-guanosine
  modified_base 93: mod_base = OTHER; note = 2'-O-Methyl-guanosine
  modified_base 94: mod_base = OTHER; note = 2'-O-Methyl-uridine
  modified_base 95: mod_base = OTHER; note = 2'-O-Methyl-guanosine
  modified_base 96: mod_base = OTHER; note = 2'-O-Methyl-cytidine
  modified_base 97: mod_base = OTHER; note = 2'-O-Methyl-uridine
  modified_base 98: mod_base = OTHER; note = 2'-O-Methyl-uridine phosphorothioate
  modified_base 99: mod_base = OTHER; note = 2'-O-Methyl-uridine phosphorothioate
  modified_base 100: mod_base = OTHER; note = 2'-O-Methyl-uridine

SEQ ID NO: 2747 - RNA, 103 nt, synthetic construct; identical to SEQ ID NO: 1700
  source 1..103: mol_type = other RNA
  modified_base 1: mod_base = OTHER; note = 2'-O-Methyl-cytidine phosphorothioate
  modified_base 2: mod_base = OTHER; note = 2'-O-Methyl-adenosine phosphorothioate
  modified_base 3: mod_base = OTHER; note = 2'-O-Methyl-guanosine
  modified_base 21: mod_base = OTHER; note = 2'-O-Methyl-guanosine
  modified_base 25: mod_base = OTHER; note = uridine phosphorothioate
  modified_base 28: mod_base = OTHER; note = 2'-O-Methyl-adenosine
  modified_base 29: mod_base = OTHER; note = 2'-O-Methyl-guanosine
  modified_base 30: mod_base = OTHER; note = 2'-O-Methyl-cytidine
  modified_base 31: mod_base = OTHER; note = 2'-O-Methyl-uridine
  modified_base 32: mod_base = OTHER; note = 2'-O-Methyl-adenosine
  modified_base 34: mod_base = OTHER; note = 2'-O-Methyl-adenosine
  modified_base 35: mod_base = OTHER; note = 2'-O-Methyl-adenosine
  modified_base 36: mod_base = OTHER; note = 2'-O-Methyl-adenosine
  modified_base 37: mod_base = OTHER; note = 2'-O-Methyl-uridine
  modified_base 38: mod_base = OTHER; note = 2'-O-Methyl-adenosine
  modified_base 39: mod_base = OTHER; note = 2'-O-Methyl-guanosine
  modified_base 40: mod_base = OTHER; note = 2'-O-Methyl-cytidine
  modified_base 41: mod_base = OTHER; note = 2'-O-Methyl-adenosine
  modified_base 42: mod_base = OTHER; note = 2'-O-Methyl-adenosine
  modified_base 46: mod_base = OTHER; note = 2'-O-Methyl-adenosine
  modified_base 48: mod_base = OTHER; note = 2'-O-Methyl-adenosine
  modified_base 50: mod_base = OTHER; note = 2'-O-Methyl-uridine
  modified_base 52: mod_base = OTHER; note = 2'-O-Methyl-adenosine
  modified_base 53: mod_base = OTHER; note = 2'-O-Methyl-guanosine
  modified_base 54: mod_base = OTHER; note = 2'-O-Methyl-guanosine
  modified_base 55: mod_base = OTHER; note = 2'-O-Methyl-cytidine
  modified_base 56: mod_base = OTHER; note = 2'-O-Methyl-uridine
  modified_base 57: mod_base = OTHER; note = 2'-O-Methyl-adenosine
  modified_base 60: mod_base = OTHER; note = 2'-O-Methyl-cytidine
  modified_base 61: mod_base = OTHER; note = 2'-O-Methyl-cytidine
  modified_base 64: mod_base = OTHER; note = uridine phosphorothioate
  modified_base 66: mod_base = OTHER; note = 2'-O-Methyl-uridine
  modified_base 67: mod_base = OTHER; note = 2'-O-Methyl-cytidine
  modified_base 70: mod_base = OTHER; note = 2'-O-Methyl-cytidine
  modified_base 71: mod_base = OTHER; note = 2'-O-Methyl-uridine
  modified_base 72: mod_base = OTHER; note = 2'-O-Methyl-uridine
  modified_base 74: mod_base = OTHER; note = 2'-O-Methyl-adenosine
  modified_base 75: mod_base = OTHER; note = 2'-O-Methyl-adenosine
  modified_base 76: mod_base = OTHER; note = 2'-O-Methyl-adenosine
  modified_base 77: mod_base = OTHER; note = 2'-O-Methyl-adenosine
  modified_base 78: mod_base = OTHER; note = 2'-O-Methyl-adenosine
  modified_base 79: mod_base = OTHER; note = 2'-O-Methyl-guanosine
  modified_base 80: mod_base = OTHER; note = 2'-O-Methyl-uridine
  modified_base 82: mod_base = OTHER; note = 2'-O-Methyl-guanosine
  modified_base 83: mod_base = OTHER; note = 2'-O-Methyl-cytidine
  modified_base 84: mod_base = OTHER; note = 2'-O-Methyl-adenosine
  modified_base 85: mod_base = OTHER; note = 2'-O-Methyl-cytidine
  modified_base 86: mod_base = OTHER; note = 2'-O-Methyl-cytidine
  modified_base 87: mod_base = OTHER; note = 2'-O-Methyl-guanosine
  modified_base 89: mod_base = OTHER; note = 2'-O-Methyl-guanosine
  modified_base 92: mod_base = OTHER; note = 2'-O-Methyl-guanosine
  modified_base 93: mod_base = OTHER; note = 2'-O-Methyl-guanosine
  modified_base 94: mod_base = OTHER; note = 2'-O-Methyl-uridine
  modified_base 95: mod_base = OTHER; note = 2'-O-Methyl-guanosine
  modified_base 96: mod_base = OTHER; note = 2'-O-Methyl-cytidine
  modified_base 97: mod_base = OTHER; note = 2'-O-Methyl-uridine
  modified_base 98: mod_base = OTHER; note = 2'-O-Methyl-uridine phosphorothioate
  modified_base 99: mod_base = OTHER; note = 2'-O-Methyl-uridine phosphorothioate
  modified_base 100: mod_base = OTHER; note = 2'-O-Methyl-uridine

SEQ ID NO: 2748 - RNA, 103 nt, synthetic construct; identical to SEQ ID NO: 1643
  source 1..103: mol_type = other RNA
  modified_base 1: mod_base = OTHER; note = 2'-O-Methyl-cytidine phosphorothioate
  modified_base 2: mod_base = OTHER; note = 2'-O-Methyl-cytidine phosphorothioate
  modified_base 3: mod_base = OTHER; note = 2'-O-Methyl-cytidine
  modified_base 21: mod_base = OTHER; note = 2'-O-Methyl-guanosine
  modified_base 25: mod_base = OTHER; note = uridine phosphorothioate
  modified_base 28: mod_base = OTHER; note = 2'-O-Methyl-adenosine
  modified_base 29: mod_base = OTHER; note = 2'-O-Methyl-guanosine
  modified_base 30: mod_base = OTHER; note = 2'-O-Methyl-cytidine
  modified_base 31: mod_base = OTHER; note = 2'-O-Methyl-uridine
  modified_base 32: mod_base = OTHER; note = 2'-O-Methyl-adenosine
  modified_base 33: mod_base = OTHER; note = 2'-O-Methyl-guanosine
  modified_base 34: mod_base = OTHER; note = 2'-O-Methyl-adenosine
  modified_base 35: mod_base = OTHER; note = 2'-O-Methyl-adenosine
  modified_base 36: mod_base = OTHER; note = 2'-O-Methyl-adenosine
  modified_base 37: mod_base = OTHER; note = 2'-O-Methyl-uridine
  modified_base 38: mod_base = OTHER; note = 2'-O-Methyl-adenosine
  modified_base 39: mod_base = OTHER; note = 2'-O-Methyl-guanosine
  modified_base 40: mod_base = OTHER; note = 2'-O-Methyl-cytidine
  modified_base 41: mod_base = OTHER; note = 2'-O-Methyl-adenosine
  modified_base 42: mod_base = OTHER; note = 2'-O-Methyl-adenosine
  modified_base 45: mod_base = OTHER; note = uridine phosphorothioate
  modified_base 46: mod_base = OTHER; note = 2'-O-Methyl-adenosine
  modified_base 48: mod_base = OTHER; note = 2'-O-Methyl-adenosine
  modified_base 50: mod_base = OTHER; note = 2'-O-Methyl-uridine
  modified_base 52: mod_base = OTHER; note = 2'-O-Methyl-adenosine
  modified_base 53: mod_base = OTHER; note = 2'-O-Methyl-guanosine
  modified_base 54: mod_base = OTHER; note = 2'-O-Methyl-guanosine
  modified_base 55: mod_base = OTHER; note = 2'-O-Methyl-cytidine
  modified_base 56: mod_base = OTHER; note = 2'-O-Methyl-uridine
  modified_base 57: mod_base = OTHER; note = 2'-O-Methyl-adenosine
  modified_base 60: mod_base = OTHER; note = 2'-O-Methyl-cytidine
  modified_base 61: mod_base = OTHER; note = 2'-O-Methyl-cytidine
  modified_base 64: mod_base = OTHER; note = uridine phosphorothioate
  modified_base 66: mod_base = OTHER; note = 2'-O-Methyl-uridine
  modified_base 67: mod_base = OTHER; note = 2'-O-Methyl-cytidine
  modified_base 70: mod_base = OTHER; note = 2'-O-Methyl-cytidine
  modified_base 71: mod_base = OTHER; note = 2'-O-Methyl-uridine
  modified_base 72: mod_base = OTHER; note = 2'-O-Methyl-uridine
  modified_base 73: mod_base = OTHER; note = 2'-O-Methyl-guanosine
  modified_base 74: mod_base = OTHER; note = 2'-O-Methyl-adenosine
  modified_base 75: mod_base = OTHER; note = 2'-O-Methyl-adenosine
  modified_base 76: mod_base = OTHER; note = 2'-O-Methyl-adenosine
  modified_base 77: mod_base = OTHER; note = 2'-O-Methyl-adenosine
  modified_base 78: mod_base = OTHER; note = 2'-O-Methyl-adenosine
  modified_base 79: mod_base = OTHER; note = 2'-O-Methyl-guanosine
  modified_base 80: mod_base = OTHER; note = 2'-O-Methyl-uridine
  modified_base 81: mod_base = OTHER; note = 2'-O-Methyl-guanosine
  modified_base 83: mod_base = OTHER; note = 2'-O-Methyl-cytidine
  modified_base 84: mod_base = OTHER; note = 2'-O-Methyl-adenosine
  modified_base 85: mod_base = OTHER; note = 2'-O-Methyl-cytidine
  modified_base 86: mod_base = OTHER; note = 2'-O-Methyl-cytidine
  modified_base 87: mod_base = OTHER; note = 2'-O-Methyl-guanosine
  modified_base 88: mod_base = OTHER; note = 2'-O-Methyl-adenosine
  modified_base 89: mod_base = OTHER; note = 2'-O-Methyl-guanosine
  modified_base 90: mod_base = OTHER; note = 2'-O-Methyl-uridine
  modified_base 91: mod_base = OTHER; note = 2'-O-Methyl-cytidine
  modified_base 92: mod_base = OTHER; note = 2'-O-Methyl-guanosine
  modified_base 93: mod_base = OTHER; note = 2'-O-Methyl-guanosine
  modified_base 94: mod_base = OTHER; note = 2'-O-Methyl-uridine
  modified_base 95: mod_base = OTHER; note = 2'-O-Methyl-guanosine
  modified_base 96: mod_base = OTHER; note = 2'-O-Methyl-cytidine
  modified_base 97: mod_base = OTHER; note = 2'-O-Methyl-uridine
  modified_base 98: mod_base = OTHER; note = 2'-O-Methyl-uridine phosphorothioate
  modified_base 99: mod_base = OTHER; note = 2'-O-Methyl-uridine phosphorothioate
  modified_base 100: mod_base = OTHER; note = 2'-O-Methyl-uridine

SEQ ID NO: 2749 - RNA, 103 nt, synthetic construct; identical to SEQ ID NO: 1643
  source 1..103: mol_type = other RNA
  modified_base 1: mod_base = OTHER; note = 2'-O-Methyl-cytidine phosphorothioate
  modified_base 2: mod_base = OTHER; note = 2'-O-Methyl-cytidine phosphorothioate
  modified_base 3: mod_base = OTHER; note = 2'-O-Methyl-cytidine
  modified_base 21: mod_base = OTHER; note = 2'-O-Methyl-guanosine
  modified_base 25: mod_base = OTHER; note = uridine phosphorothioate
  modified_base 28: mod_base = OTHER; note = 2'-O-Methyl-adenosine
  modified_base 29: mod_base = OTHER; note = 2'-O-Methyl-guanosine
  modified_base 30: mod_base = OTHER; note = 2'-O-Methyl-cytidine
  modified_base 31: mod_base = OTHER; note = 2'-O-Methyl-uridine
  modified_base 32: mod_base = OTHER; note = 2'-O-Methyl-adenosine
  modified_base 34: mod_base = OTHER; note = 2'-O-Methyl-adenosine
  modified_base 35: mod_base = OTHER; note = 2'-O-Methyl-adenosine
  modified_base 36: mod_base = OTHER; note = 2'-O-Methyl-adenosine
  modified_base 37: mod_base = OTHER; note = 2'-O-Methyl-uridine
  modified_base 38: mod_base = OTHER; note = 2'-O-Methyl-adenosine
  modified_base 39: mod_base = OTHER; note = 2'-O-Methyl-guanosine
  modified_base 40: mod_base = OTHER; note = 2'-O-Methyl-cytidine
  modified_base 41: mod_base = OTHER; note = 2'-O-Methyl-adenosine
  modified_base 42: mod_base = OTHER; note = 2'-O-Methyl-adenosine
  modified_base 45: mod_base = OTHER; note = uridine phosphorothioate
  modified_base 46: mod_base = OTHER; note = 2'-O-Methyl-adenosine
  modified_base 48: mod_base = OTHER; note = 2'-O-Methyl-adenosine
  modified_base 50: mod_base = OTHER; note = 2'-O-Methyl-uridine
  modified_base 52: mod_base = OTHER; note = 2'-O-Methyl-adenosine
  modified_base 53: mod_base = OTHER; note = 2'-O-Methyl-guanosine
  modified_base 54: mod_base = OTHER; note = 2'-O-Methyl-guanosine
  modified_base 55: mod_base = OTHER; note = 2'-O-Methyl-cytidine
  modified_base 56: mod_base = OTHER; note = 2'-O-Methyl-uridine
  modified_base 57: mod_base = OTHER; note = 2'-O-Methyl-adenosine
  modified_base 60: mod_base = OTHER; note = 2'-O-Methyl-cytidine
  modified_base 61: mod_base = OTHER; note = 2'-O-Methyl-cytidine
  modified_base 64: mod_base = OTHER; note = uridine phosphorothioate
  modified_base 66: mod_base = OTHER; note = 2'-O-Methyl-uridine
  modified_base 67: mod_base = OTHER; note = 2'-O-Methyl-cytidine
  modified_base 70: mod_base = OTHER; note = 2'-O-Methyl-cytidine
  modified_base 71: mod_base = OTHER; note = 2'-O-Methyl-uridine
  modified_base 72: mod_base = OTHER; note = 2'-O-Methyl-uridine
  modified_base 74: mod_base = OTHER; note = 2'-O-Methyl-adenosine
  modified_base 75: mod_base = OTHER; note = 2'-O-Methyl-adenosine
  modified_base 76: mod_base = OTHER; note = 2'-O-Methyl-adenosine
  modified_base 77: mod_base = OTHER; note = 2'-O-Methyl-adenosine
  modified_base 78: mod_base = OTHER; note = 2'-O-Methyl-adenosine
  modified_base 79: mod_base = OTHER; note = 2'-O-Methyl-guanosine
  modified_base 80: mod_base = OTHER; note = 2'-O-Methyl-uridine
  modified_base 81: mod_base = OTHER; note = 2'-O-Methyl-guanosine
  modified_base 83: mod_base = OTHER; note = 2'-O-Methyl-cytidine
  modified_base 84: mod_base = OTHER; note = 2'-O-Methyl-adenosine
  modified_base 85: mod_base = OTHER; note = 2'-O-Methyl-cytidine
  modified_base 86: mod_base = OTHER; note = 2'-O-Methyl-cytidine
  modified_base 87: mod_base = OTHER; note = 2'-O-Methyl-guanosine
  modified_base 88: mod_base = OTHER; note = 2'-O-Methyl-adenosine
  modified_base 89: mod_base = OTHER; note = 2'-O-Methyl-guanosine
  modified_base 90: mod_base = OTHER; note = 2'-O-Methyl-uridine
  modified_base 91: mod_base = OTHER; note = 2'-O-Methyl-cytidine
  modified_base 92: mod_base = OTHER; note = 2'-O-Methyl-guanosine
  modified_base 93: mod_base = OTHER; note = 2'-O-Methyl-guanosine
  modified_base 94: mod_base = OTHER; note = 2'-O-Methyl-uridine
  modified_base 95: mod_base = OTHER; note = 2'-O-Methyl-guanosine
  modified_base 96: mod_base = OTHER; note = 2'-O-Methyl-cytidine
  modified_base 97: mod_base = OTHER; note = 2'-O-Methyl-uridine
  modified_base 98: mod_base = OTHER; note = 2'-O-Methyl-uridine phosphorothioate
  modified_base 99: mod_base = OTHER; note = 2'-O-Methyl-uridine phosphorothioate
  modified_base 100: mod_base = OTHER; note = 2'-O-Methyl-uridine

SEQ ID NO: 2750 - RNA, 103 nt, synthetic construct; identical to SEQ ID NO: 1699
  source 1..103: mol_type = other RNA
  modified_base 1: mod_base = OTHER; note = 2'-O-Methyl-guanosine phosphorothioate
  modified_base 2: mod_base = OTHER; note = 2'-O-Methyl-adenosine phosphorothioate
  modified_base 3: mod_base = OTHER; note = 2'-O-Methyl-guanosine
  modified_base 21: mod_base = OTHER; note = 2'-O-Methyl-guanosine
  modified_base 25: mod_base = OTHER; note = uridine phosphorothioate
  modified_base 28: mod_base = OTHER; note = 2'-O-Methyl-adenosine
  modified_base 29: mod_base = OTHER; note = 2'-O-Methyl-guanosine
  modified_base 30: mod_base = OTHER; note = 2'-O-Methyl-cytidine
  modified_base 31: mod_base = OTHER; note = 2'-O-Methyl-uridine
  modified_base 32: mod_base = OTHER; note = 2'-O-Methyl-adenosine
  modified_base 33: mod_base = OTHER; note = 2'-O-Methyl-guanosine
  modified_base 34: mod_base = OTHER; note = 2'-O-Methyl-adenosine
  modified_base 35: mod_base = OTHER; note = 2'-O-Methyl-adenosine
  modified_base 36: mod_base = OTHER; note = 2'-O-Methyl-adenosine
  modified_base 37: mod_base = OTHER; note = 2'-O-Methyl-uridine
  modified_base 38: mod_base = OTHER; note = 2'-O-Methyl-adenosine
  modified_base 39: mod_base = OTHER; note = 2'-O-Methyl-guanosine
  modified_base 40: mod_base = OTHER; note = 2'-O-Methyl-cytidine
  modified_base 41: mod_base = OTHER; note = 2'-O-Methyl-adenosine
  modified_base 42: mod_base = OTHER; note = 2'-O-Methyl-adenosine
  modified_base 45: mod_base = OTHER; note = uridine phosphorothioate
  modified_base 46: mod_base = OTHER; note = 2'-O-Methyl-adenosine
  modified_base 48: mod_base = OTHER; note = 2'-O-Methyl-adenosine
  modified_base 50: mod_base = OTHER; note = 2'-O-Methyl-uridine
  modified_base 52: mod_base = OTHER; note = 2'-O-Methyl-adenosine
  modified_base 53: mod_base = OTHER; note = 2'-O-Methyl-guanosine
  modified_base 54: mod_base = OTHER; note = 2'-O-Methyl-guanosine
  modified_base 55: mod_base = OTHER; note = 2'-O-Methyl-cytidine
  modified_base 56: mod_base = OTHER; note = 2'-O-Methyl-uridine
  modified_base 57: mod_base = OTHER; note = 2'-O-Methyl-adenosine
  modified_base 60: mod_base = OTHER; note = 2'-O-Methyl-cytidine
  modified_base 61: mod_base = OTHER; note = 2'-O-Methyl-cytidine
  modified_base 64: mod_base = OTHER; note = uridine phosphorothioate
  modified_base 66: mod_base = OTHER; note = 2'-O-Methyl-uridine
  modified_base 67: mod_base = OTHER; note = 2'-O-Methyl-cytidine
  modified_base 70: mod_base = OTHER; note = 2'-O-Methyl-cytidine
  modified_base 71: mod_base = OTHER; note = 2'-O-Methyl-uridine
  modified_base 72: mod_base = OTHER; note = 2'-O-Methyl-uridine
  modified_base 73: mod_base = OTHER; note = 2'-O-Methyl-guanosine
  modified_base 74: mod_base = OTHER; note = 2'-O-Methyl-adenosine
  modified_base 75: mod_base = OTHER; note = 2'-O-Methyl-adenosine
  modified_base 76: mod_base = OTHER; note = 2'-O-Methyl-adenosine
  modified_base 77: mod_base = OTHER; note = 2'-O-Methyl-adenosine
  modified_base 78: mod_base = OTHER; note = 2'-O-Methyl-adenosine
  modified_base 79: mod_base = OTHER; note = 2'-O-Methyl-guanosine
  modified_base 80: mod_base = OTHER; note = 2'-O-Methyl-uridine
  modified_base 81: mod_base = OTHER; note = 2'-O-Methyl-guanosine
  modified_base 83: mod_base = OTHER; note = 2'-O-Methyl-cytidine
  modified_base 84: mod_base = OTHER; note = 2'-O-Methyl-adenosine
  modified_base 85: mod_base = OTHER; note = 2'-O-Methyl-cytidine
  modified_base 86: mod_base = OTHER; note = 2'-O-Methyl-cytidine
  modified_base 87: mod_base = OTHER; note = 2'-O-Methyl-guanosine
  modified_base 88: mod_base = OTHER; note = 2'-O-Methyl-adenosine
  modified_base 89: mod_base = OTHER; note = 2'-O-Methyl-guanosine
  modified_base 90: mod_base = OTHER; note = 2'-O-Methyl-uridine
  modified_base 91: mod_base = OTHER; note = 2'-O-Methyl-cytidine
  modified_base 92: mod_base = OTHER; note = 2'-O-Methyl-guanosine
  modified_base 93: mod_base = OTHER; note = 2'-O-Methyl-guanosine
  modified_base 94: mod_base = OTHER; note = 2'-O-Methyl-uridine
  modified_base 95: mod_base = OTHER; note = 2'-O-Methyl-guanosine
  modified_base 96: mod_base = OTHER; note = 2'-O-Methyl-cytidine
  modified_base 97: mod_base = OTHER; note = 2'-O-Methyl-uridine
  modified_base 98: mod_base = OTHER; note = 2'-O-Methyl-uridine phosphorothioate
  modified_base 99: mod_base = OTHER; note = 2'-O-Methyl-uridine phosphorothioate
  modified_base 100: mod_base = OTHER; note = 2'-O-Methyl-uridine

SEQ ID NO: 2751 - RNA, 103 nt, synthetic construct; identical to SEQ ID NO: 1699
  source 1..103: mol_type = other RNA
  modified_base 1: mod_base = OTHER; note = 2'-O-Methyl-guanosine phosphorothioate
  modified_base 2: mod_base = OTHER; note = 2'-O-Methyl-adenosine phosphorothioate
  modified_base 3: mod_base = OTHER; note = 2'-O-Methyl-guanosine
  modified_base 21: mod_base = OTHER; note = 2'-O-Methyl-guanosine
  modified_base 25: mod_base = OTHER; note = uridine phosphorothioate
  modified_base 28: mod_base = OTHER; note = 2'-O-Methyl-adenosine
  modified_base 29: mod_base = OTHER; note = 2'-O-Methyl-guanosine
  modified_base 30: mod_base = OTHER; note = 2'-O-Methyl-cytidine
  modified_base 31: mod_base = OTHER; note = 2'-O-Methyl-uridine
  modified_base 32: mod_base = OTHER; note = 2'-O-Methyl-adenosine
  modified_base 34: mod_base = OTHER; note = 2'-O-Methyl-adenosine
  modified_base 35: mod_base = OTHER; note = 2'-O-Methyl-adenosine
  modified_base 36: mod_base = OTHER; note = 2'-O-Methyl-adenosine
  modified_base 37: mod_base = OTHER; note = 2'-O-Methyl-uridine
  modified_base 38: mod_base = OTHER; note = 2'-O-Methyl-adenosine
  modified_base 39: mod_base = OTHER; note = 2'-O-Methyl-guanosine
  modified_base 40: mod_base = OTHER; note = 2'-O-Methyl-cytidine
  modified_base 41: mod_base = OTHER; note = 2'-O-Methyl-adenosine
  modified_base 42: mod_base = OTHER; note = 2'-O-Methyl-adenosine
  modified_base 45: mod_base = OTHER; note = uridine phosphorothioate
  modified_base 46: mod_base = OTHER; note = 2'-O-Methyl-adenosine
  modified_base 48: mod_base = OTHER; note = 2'-O-Methyl-adenosine
  modified_base 50: mod_base = OTHER; note = 2'-O-Methyl-uridine
  modified_base 52: mod_base = OTHER; note = 2'-O-Methyl-adenosine
  modified_base 53: mod_base = OTHER; note = 2'-O-Methyl-guanosine
  modified_base 54: mod_base = OTHER; note = 2'-O-Methyl-guanosine
  modified_base 55: mod_base = OTHER; note = 2'-O-Methyl-cytidine
  modified_base 56: mod_base = OTHER; note = 2'-O-Methyl-uridine
  modified_base 57: mod_base = OTHER; note = 2'-O-Methyl-adenosine
  modified_base 60: mod_base = OTHER; note = 2'-O-Methyl-cytidine
  modified_base 61: mod_base = OTHER; note = 2'-O-Methyl-cytidine
  modified_base 64: mod_base = OTHER; note = uridine phosphorothioate
  modified_base 66: mod_base = OTHER; note = 2'-O-Methyl-uridine
  modified_base 67: mod_base = OTHER; note = 2'-O-Methyl-cytidine
  modified_base 70: mod_base = OTHER; note = 2'-O-Methyl-cytidine
  modified_base 71: mod_base = OTHER; note = 2'-O-Methyl-uridine
  modified_base 72: mod_base = OTHER; note = 2'-O-Methyl-uridine
  modified_base 74: mod_base = OTHER; note = 2'-O-Methyl-adenosine
  modified_base 75: mod_base = OTHER; note = 2'-O-Methyl-adenosine
  modified_base 76: mod_base = OTHER; note = 2'-O-Methyl-adenosine
  modified_base 77: mod_base = OTHER; note = 2'-O-Methyl-adenosine
  modified_base 78: mod_base = OTHER; note = 2'-O-Methyl-adenosine
  modified_base 79: mod_base = OTHER; note = 2'-O-Methyl-guanosine
  modified_base 80: mod_base = OTHER; note = 2'-O-Methyl-uridine
  modified_base 81: mod_base = OTHER; note = 2'-O-Methyl-guanosine
  modified_base 83: mod_base = OTHER; note = 2'-O-Methyl-cytidine
  modified_base 84: mod_base = OTHER; note = 2'-O-Methyl-adenosine
  modified_base 85: mod_base = OTHER; note = 2'-O-Methyl-cytidine
  modified_base 86: mod_base = OTHER; note = 2'-O-Methyl-cytidine
  modified_base 87: mod_base = OTHER; note = 2'-O-Methyl-guanosine
  modified_base 88: mod_base = OTHER; note = 2'-O-Methyl-adenosine
  modified_base 89: mod_base = OTHER; note = 2'-O-Methyl-guanosine
  modified_base 90: mod_base = OTHER; note = 2'-O-Methyl-uridine
  modified_base 91: mod_base = OTHER; note = 2'-O-Methyl-cytidine
  modified_base 92: mod_base = OTHER; note = 2'-O-Methyl-guanosine
  modified_base 93: mod_base = OTHER; note = 2'-O-Methyl-guanosine
  modified_base 94: mod_base = OTHER; note = 2'-O-Methyl-uridine
  modified_base 95: mod_base = OTHER; note = 2'-O-Methyl-guanosine
  modified_base 96: mod_base = OTHER; note = 2'-O-Methyl-cytidine
  modified_base 97: mod_base = OTHER; note = 2'-O-Methyl-uridine
  modified_base 98: mod_base = OTHER; note = 2'-O-Methyl-uridine phosphorothioate
  modified_base 99: mod_base = OTHER; note = 2'-O-Methyl-uridine phosphorothioate
  modified_base 100: mod_base = OTHER; note = 2'-O-Methyl-uridine

SEQ ID NO: 2752 - RNA, 103 nt, synthetic construct; identical to SEQ ID NO: 1700
  source 1..103: mol_type = other RNA
  modified_base 1: mod_base = OTHER; note = 2'-O-Methyl-cytidine phosphorothioate
  modified_base 2: mod_base = OTHER; note = 2'-O-Methyl-adenosine phosphorothioate
  modified_base 3: mod_base = OTHER; note = 2'-O-Methyl-guanosine
  modified_base 21: mod_base = OTHER; note = 2'-O-Methyl-guanosine
  modified_base 25: mod_base = OTHER; note = uridine phosphorothioate
  modified_base 28: mod_base = OTHER; note = 2'-O-Methyl-adenosine
  modified_base 29: mod_base = OTHER; note = 2'-O-Methyl-guanosine
  modified_base 30: mod_base = OTHER; note = 2'-O-Methyl-cytidine
  modified_base 31: mod_base = OTHER; note = 2'-O-Methyl-uridine
  modified_base 32: mod_base = OTHER; note = 2'-O-Methyl-adenosine
  modified_base 33: mod_base = OTHER; note = 2'-O-Methyl-guanosine
  modified_base 34: mod_base = OTHER; note = 2'-O-Methyl-adenosine
  modified_base 35: mod_base = OTHER; note = 2'-O-Methyl-adenosine
  modified_base 36: mod_base = OTHER; note = 2'-O-Methyl-adenosine
  modified_base 37: mod_base = OTHER; note = 2'-O-Methyl-uridine
  modified_base 38: mod_base = OTHER; note = 2'-O-Methyl-adenosine
  modified_base 39: mod_base = OTHER; note = 2'-O-Methyl-guanosine
  modified_base 40: mod_base = OTHER; note = 2'-O-Methyl-cytidine
  modified_base 41: mod_base = OTHER; note = 2'-O-Methyl-adenosine
  modified_base 42: mod_base = OTHER; note = 2'-O-Methyl-adenosine
  modified_base 45: mod_base = OTHER; note = uridine phosphorothioate
  modified_base 46: mod_base = OTHER; note = 2'-O-Methyl-adenosine
  modified_base 48: mod_base = OTHER; note = 2'-O-Methyl-adenosine
  modified_base 50: mod_base = OTHER; note = 2'-O-Methyl-uridine
  modified_base 52: mod_base = OTHER; note = 2'-O-Methyl-adenosine
  modified_base 53: mod_base = OTHER; note = 2'-O-Methyl-guanosine
  modified_base 54: mod_base = OTHER; note = 2'-O-Methyl-guanosine
  modified_base 57: mod_base = OTHER; note = 2'-O-Methyl-adenosine
  modified_base 61: mod_base = OTHER; note = 2'-O-Methyl-cytidine
  modified_base 64: mod_base = OTHER; note = uridine phosphorothioate
  modified_base 66: mod_base = OTHER; note = 2'-O-Methyl-uridine
  modified_base 67: mod_base = OTHER; note = 2'-O-Methyl-cytidine
  modified_base 70: mod_base = OTHER; note = 2'-O-Methyl-cytidine
  modified_base 71: mod_base = OTHER; note = 2'-O-Methyl-uridine
  modified_base 72: mod_base = OTHER; note = 2'-O-Methyl-uridine
  modified_base 74: mod_base = OTHER; note = 2'-O-Methyl-adenosine
  modified_base 75: mod_base = OTHER; note = 2'-O-Methyl-adenosine
  modified_base 76: mod_base = OTHER; note = 2'-O-Methyl-adenosine
  modified_base 77: mod_base = OTHER; note = 2'-O-Methyl-adenosine
  modified_base 78: mod_base = OTHER; note = 2'-O-Methyl-adenosine
  modified_base 79: mod_base = OTHER; note = 2'-O-Methyl-guanosine
  modified_base 80: mod_base = OTHER; note = 2'-O-Methyl-uridine
  modified_base 82: mod_base = OTHER; note = 2'-O-Methyl-guanosine
  modified_base 83: mod_base = OTHER; note = 2'-O-Methyl-cytidine
  modified_base 84: mod_base = OTHER; note = 2'-O-Methyl-adenosine
  modified_base 85: mod_base = OTHER; note = 2'-O-Methyl-cytidine
  modified_base 86: mod_base = OTHER; note = 2'-O-Methyl-cytidine
  modified_base 87: mod_base = OTHER; note = 2'-O-Methyl-guanosine
  modified_base 89: mod_base = OTHER; note = 2'-O-Methyl-guanosine
  modified_base 92: mod_base = OTHER; note = 2'-O-Methyl-guanosine
  modified_base 93: mod_base = OTHER; note = 2'-O-Methyl-guanosine
  modified_base 94: mod_base = OTHER; note = 2'-O-Methyl-uridine
  modified_base 95: mod_base = OTHER; note = 2'-O-Methyl-guanosine
  modified_base 96: mod_base = OTHER; note = 2'-O-Methyl-cytidine
  modified_base 97: mod_base = OTHER; note = 2'-O-Methyl-uridine
  modified_base 98: mod_base = OTHER; note = 2'-O-Methyl-uridine phosphorothioate
  modified_base 99: mod_base = OTHER; note = 2'-O-Methyl-uridine phosphorothioate
  modified_base 100: mod_base = OTHER; note = 2'-O-Methyl-uridine

SEQ ID NO: 2753 - RNA, 103 nt, synthetic construct; identical to SEQ ID NO: 1700
  source 1..103: mol_type = other RNA
  modified_base 1: mod_base = OTHER; note = 2'-O-Methyl-cytidine phosphorothioate
  modified_base 2: mod_base = OTHER; note = 2'-O-Methyl-adenosine phosphorothioate
  modified_base 3: mod_base = OTHER; note = 2'-O-Methyl-guanosine
  modified_base 21: mod_base = OTHER; note = 2'-O-Methyl-guanosine
  modified_base 25: mod_base = OTHER; note = uridine phosphorothioate
  modified_base 28: mod_base = OTHER; note = 2'-O-Methyl-adenosine
  modified_base 29: mod_base = OTHER; note = 2'-O-Methyl-guanosine
  modified_base 30: mod_base = OTHER; note = 2'-O-Methyl-cytidine
  modified_base 31: mod_base = OTHER; note = 2'-O-Methyl-uridine
  modified_base 32: mod_base = OTHER; note = 2'-O-Methyl-adenosine
  modified_base 33: mod_base = OTHER; note = 2'-O-Methyl-guanosine
  modified_base 34: mod_base = OTHER; note = 2'-O-Methyl-adenosine
  modified_base 35: mod_base = OTHER; note = 2'-O-Methyl-adenosine
  modified_base 36: mod_base = OTHER; note = 2'-O-Methyl-adenosine
  modified_base 37: mod_base = OTHER; note = 2'-O-Methyl-uridine
  modified_base 38: mod_base = OTHER; note = 2'-O-Methyl-adenosine
  modified_base 39: mod_base = OTHER; note = 2'-O-Methyl-guanosine
  modified_base 40: mod_base = OTHER; note = 2'-O-Methyl-cytidine
  modified_base 41: mod_base = OTHER; note = 2'-O-Methyl-adenosine
  modified_base 42: mod_base = OTHER; note = 2'-O-Methyl-adenosine
  modified_base 45: mod_base = OTHER; note = uridine phosphorothioate
  modified_base 46: mod_base = OTHER; note = 2'-O-Methyl-adenosine
  modified_base 48: mod_base = OTHER; note = 2'-O-Methyl-adenosine
  modified_base 50: mod_base = OTHER; note = 2'-O-Methyl-uridine
  modified_base 52: mod_base = OTHER; note = 2'-O-Methyl-adenosine
  modified_base 53: mod_base = OTHER; note = 2'-O-Methyl-guanosine
  modified_base 54: mod_base = OTHER; note = 2'-O-Methyl-guanosine
  modified_base 55: mod_base = OTHER; note = 2'-O-Methyl-cytidine
  modified_base 56: mod_base = OTHER; note = 2'-O-Methyl-uridine
  modified_base 57: mod_base = OTHER; note = 2'-O-Methyl-adenosine
  modified_base 60: mod_base = OTHER; note = 2'-O-Methyl-cytidine
  modified_base 61: mod_base = OTHER; note = 2'-O-Methyl-cytidine
  modified_base 64: mod_base = OTHER; note = uridine phosphorothioate
  modified_base 66: mod_base = OTHER; note = 2'-O-Methyl-uridine
  modified_base 67: mod_base = OTHER; note = 2'-O-Methyl-cytidine
  modified_base 70: mod_base = OTHER; note = 2'-O-Methyl-cytidine
  modified_base 71: mod_base = OTHER; note = 2'-O-Methyl-uridine
  modified_base 72: mod_base = OTHER; note = 2'-O-Methyl-uridine
  modified_base 74: mod_base = OTHER; note = 2'-O-Methyl-adenosine
  modified_base 75: mod_base = OTHER; note = 2'-O-Methyl-adenosine
  modified_base 76: mod_base = OTHER; note = 2'-O-Methyl-adenosine
  modified_base 77: mod_base = OTHER; note = 2'-O-Methyl-adenosine
  modified_base 78: mod_base = OTHER; note = 2'-O-Methyl-adenosine
  modified_base 79: mod_base = OTHER; note = 2'-O-Methyl-guanosine
  modified_base 80: mod_base = OTHER; note = 2'-O-Methyl-uridine
  modified_base 82: mod_base = OTHER; note = 2'-O-Methyl-guanosine
  modified_base 83: mod_base = OTHER; note = 2'-O-Methyl-cytidine
  modified_base 84: mod_base = OTHER; note = 2'-O-Methyl-adenosine
  modified_base 85: mod_base = OTHER; note = 2'-O-Methyl-cytidine
  modified_base 86: mod_base = OTHER; note = 2'-O-Methyl-cytidine
  modified_base 87: mod_base = OTHER; note = 2'-O-Methyl-guanosine
  modified_base 89: mod_base = OTHER; note = 2'-O-Methyl-guanosine
  modified_base 92: mod_base = OTHER; note = 2'-O-Methyl-guanosine
  modified_base 93: mod_base = OTHER; note = 2'-O-Methyl-guanosine
  modified_base 94: mod_base = OTHER; note = 2'-O-Methyl-uridine
  modified_base 95: mod_base = OTHER; note = 2'-O-Methyl-guanosine
  modified_base 96: mod_base = OTHER; note = 2'-O-Methyl-cytidine
  modified_base 97: mod_base = OTHER; note = 2'-O-Methyl-uridine
  modified_base 98: mod_base = OTHER; note = 2'-O-Methyl-uridine phosphorothioate
  modified_base 99: mod_base = OTHER; note = 2'-O-Methyl-uridine phosphorothioate
  modified_base 100: mod_base = OTHER; note = 2'-O-Methyl-uridine

SEQ ID NO: 2754 - RNA, 103 nt, synthetic construct; identical to SEQ ID NO: 1700
  source 1..103: mol_type = other RNA
  modified_base 1: mod_base = OTHER; note = 2'-O-Methyl-cytidine phosphorothioate
  modified_base 2: mod_base = OTHER; note = 2'-O-Methyl-adenosine phosphorothioate
  modified_base 3: mod_base = OTHER; note = 2'-O-Methyl-guanosine
  modified_base 21: mod_base = OTHER; note = 2'-O-Methyl-guanosine
  modified_base 25: mod_base = OTHER; note = uridine phosphorothioate
  modified_base 28: mod_base = OTHER; note = 2'-O-Methyl-adenosine
  modified_base 29: mod_base = OTHER; note = 2'-O-Methyl-guanosine
  modified_base 30: mod_base = OTHER; note = 2'-O-Methyl-cytidine
  modified_base 31: mod_base = OTHER; note = 2'-O-Methyl-uridine
  modified_base 32: mod_base = OTHER; note = 2'-O-Methyl-adenosine
  modified_base 33: mod_base = OTHER; note = 2'-O-Methyl-guanosine
  modified_base 34: mod_base = OTHER; note = 2'-O-Methyl-adenosine
  modified_base 35: mod_base = OTHER; note = 2'-O-Methyl-adenosine
  modified_base 36: mod_base = OTHER; note = 2'-O-Methyl-adenosine
  modified_base 37: mod_base = OTHER; note = 2'-O-Methyl-uridine
  modified_base 38: mod_base = OTHER; note = 2'-O-Methyl-adenosine
  modified_base 39: mod_base = OTHER; note = 2'-O-Methyl-guanosine
  modified_base 40: mod_base = OTHER; note = 2'-O-Methyl-cytidine
  modified_base 41: mod_base = OTHER; note = 2'-O-Methyl-adenosine
  modified_base 42: mod_base = OTHER; note = 2'-O-Methyl-adenosine
  modified_base 45: mod_base = OTHER; note = uridine phosphorothioate
  modified_base 46: mod_base = OTHER; note = 2'-O-Methyl-adenosine
  modified_base 48: mod_base = OTHER; note = 2'-O-Methyl-adenosine
  modified_base 50: mod_base = OTHER; note = 2'-O-Methyl-uridine
  modified_base 52: mod_base = OTHER; note = 2'-O-Methyl-adenosine
  modified_base 53: mod_base = OTHER; note = 2'-O-Methyl-guanosine
  modified_base 54: mod_base = OTHER; note = 2'-O-Methyl-guanosine
  modified_base 57: mod_base = OTHER; note = 2'-O-Methyl-adenosine
  modified_base 61: mod_base = OTHER; note = 2'-O-Methyl-cytidine
  modified_base 64: mod_base = OTHER; note = uridine phosphorothioate
  modified_base 66: mod_base = OTHER; note = 2'-O-Methyl-uridine
  modified_base 67: mod_base = OTHER; note = 2'-O-Methyl-cytidine
  modified_base 70: mod_base = OTHER; note = 2'-O-Methyl-cytidine
  modified_base 71: mod_base = OTHER; note = 2'-O-Methyl-uridine
  modified_base 72: mod_base = OTHER; note = 2'-O-Methyl-uridine
  modified_base 73: mod_base = OTHER; note = 2'-O-Methyl-guanosine
  modified_base 74: mod_base = OTHER; note = 2'-O-Methyl-adenosine
  modified_base 75: mod_base = OTHER; note = 2'-O-Methyl-adenosine
  modified_base 76: mod_base = OTHER; note = 2'-O-Methyl-adenosine
  modified_base 77: mod_base = OTHER; note = 2'-O-Methyl-adenosine
  modified_base 78: mod_base = OTHER; note = 2'-O-Methyl-adenosine
  modified_base 79: mod_base = OTHER; note = 2'-O-Methyl-guanosine
  modified_base 80: mod_base = OTHER; note = 2'-O-Methyl-uridine
  modified_base 82: mod_base = OTHER; note = 2'-O-Methyl-guanosine
  modified_base 83: mod_base = OTHER; note = 2'-O-Methyl-cytidine
  modified_base 84: mod_base = OTHER; note = 2'-O-Methyl-adenosine
  modified_base 85: mod_base = OTHER; note = 2'-O-Methyl-cytidine
  modified_base 86: mod_base = OTHER; note = 2'-O-Methyl-cytidine
  modified_base 87: mod_base = OTHER; note = 2'-O-Methyl-guanosine
  modified_base 89: mod_base = OTHER; note = 2'-O-Methyl-guanosine
  modified_base 92: mod_base = OTHER; note = 2'-O-Methyl-guanosine
  modified_base 93: mod_base = OTHER; note = 2'-O-Methyl-guanosine
  modified_base 94: mod_base = OTHER; note = 2'-O-Methyl-uridine
  modified_base 95: mod_base = OTHER; note = 2'-O-Methyl-guanosine
  modified_base 96: mod_base = OTHER; note = 2'-O-Methyl-cytidine
  modified_base 97: mod_base = OTHER; note = 2'-O-Methyl-uridine
  modified_base 98: mod_base = OTHER; note = 2'-O-Methyl-uridine phosphorothioate
  modified_base 99: mod_base = OTHER; note = 2'-O-Methyl-uridine phosphorothioate
  modified_base 100: mod_base = OTHER; note = 2'-O-Methyl-uridine

SEQ ID NO: 2755 - RNA, 103 nt, synthetic construct; identical to SEQ ID NO: 1700
  source 1..103: mol_type = other RNA
  modified_base 1: mod_base = OTHER; note = 2'-O-Methyl-cytidine phosphorothioate
  modified_base 2: mod_base = OTHER; note = 2'-O-Methyl-adenosine phosphorothioate
  modified_base 3: mod_base = OTHER; note = 2'-O-Methyl-guanosine
  modified_base 21: mod_base = OTHER; note = 2'-O-Methyl-guanosine
  modified_base 25: mod_base = OTHER; note = uridine phosphorothioate
  modified_base 28: mod_base = OTHER; note = 2'-O-Methyl-adenosine
  modified_base 29: mod_base = OTHER; note = 2'-O-Methyl-guanosine
  modified_base 30: mod_base = OTHER; note = 2'-O-Methyl-cytidine
  modified_base 31: mod_base = OTHER; note = 2'-O-Methyl-uridine
  modified_base 32: mod_base = OTHER; note = 2'-O-Methyl-adenosine
  modified_base 33: mod_base = OTHER; note = 2'-O-Methyl-guanosine
  modified_base 34: mod_base = OTHER; note = 2'-O-Methyl-adenosine
  modified_base 35: mod_base = OTHER; note = 2'-O-Methyl-adenosine
  modified_base 36: mod_base = OTHER; note = 2'-O-Methyl-adenosine
  modified_base 37: mod_base = OTHER; note = 2'-O-Methyl-uridine
  modified_base 38: mod_base = OTHER; note = 2'-O-Methyl-adenosine
  modified_base 39: mod_base = OTHER; note = 2'-O-Methyl-guanosine
  modified_base 40: mod_base = OTHER; note = 2'-O-Methyl-cytidine
  modified_base 41: mod_base = OTHER; note = 2'-O-Methyl-adenosine
  modified_base 42: mod_base = OTHER; note = 2'-O-Methyl-adenosine
  modified_base 45: mod_base = OTHER; note = uridine phosphorothioate
  modified_base 46: mod_base = OTHER; note = 2'-O-Methyl-adenosine
  modified_base 48: mod_base = OTHER; note = 2'-O-Methyl-adenosine
  modified_base 50: mod_base = OTHER; note = 2'-O-Methyl-uridine
  modified_base 52: mod_base = OTHER; note = 2'-O-Methyl-adenosine
  modified_base 53: mod_base = OTHER; note = 2'-O-Methyl-guanosine
  modified_base 54: mod_base = OTHER; note = 2'-O-Methyl-guanosine
  modified_base 57: mod_base = OTHER; note = 2'-O-Methyl-adenosine
  modified_base 61: mod_base = OTHER; note = 2'-O-Methyl-cytidine
  modified_base 64: mod_base = OTHER; note = uridine phosphorothioate
  modified_base 66: mod_base = OTHER; note = 2'-O-Methyl-uridine
  modified_base 67: mod_base = OTHER; note = 2'-O-Methyl-cytidine
  modified_base 70: mod_base = OTHER; note = 2'-O-Methyl-cytidine
  modified_base 71: mod_base = OTHER; note = 2'-O-Methyl-uridine
  modified_base 72: mod_base = OTHER; note = 2'-O-Methyl-uridine
  modified_base 73: mod_base = OTHER; note = 2'-O-Methyl-guanosine
  modified_base 74: mod_base = OTHER; note = 2'-O-Methyl-adenosine
  modified_base 75: mod_base = OTHER; note = 2'-O-Methyl-adenosine
  modified_base 76: mod_base = OTHER; note = 2'-O-Methyl-adenosine
  modified_base 77: mod_base = OTHER; note = 2'-O-Methyl-adenosine
  modified_base 78: mod_base = OTHER; note = 2'-O-Methyl-adenosine
  modified_base 79: mod_base = OTHER; note = 2'-O-Methyl-guanosine
  modified_base 80: mod_base = OTHER; note = 2'-O-Methyl-uridine
  modified_base 82: mod_base = OTHER; note = 2'-O-Methyl-guanosine
  modified_base 83: mod_base = OTHER; note = 2'-O-Methyl-cytidine
  modified_base 84: mod_base = OTHER; note = 2'-O-Methyl-adenosine
  modified_base 85: mod_base = OTHER; note = 2'-O-Methyl-cytidine
  modified_base 86: mod_base = OTHER; note = 2'-O-Methyl-cytidine
  modified_base 87: mod_base = OTHER; note = 2'-O-Methyl-guanosine
  modified_base 89: mod_base = OTHER; note = 2'-O-Methyl-guanosine
  modified_base 91: mod_base = OTHER; note = 2'-O-Methyl-cytidine
  modified_base 92: mod_base = OTHER; note = 2'-O-Methyl-guanosine
  modified_base 93: mod_base = OTHER; note = 2'-O-Methyl-guanosine
  modified_base 94: mod_base = OTHER; note = 2'-O-Methyl-uridine
  modified_base 95: mod_base = OTHER; note = 2'-O-Methyl-guanosine
  modified_base 96: mod_base = OTHER; note = 2'-O-Methyl-cytidine
  modified_base 97: mod_base = OTHER; note = 2'-O-Methyl-uridine
  modified_base 98: mod_base = OTHER; note = 2'-O-Methyl-uridine phosphorothioate
  modified_base 99: mod_base = OTHER; note = 2'-O-Methyl-uridine phosphorothioate
  modified_base 100: mod_base = OTHER; note = 2'-O-Methyl-uridine

SEQ ID NO: 2756 - RNA, 103 nt, synthetic construct; identical to SEQ ID NO: 1700
  source 1..103: mol_type = other RNA
  modified_base 1: mod_base = OTHER; note = 2'-O-Methyl-cytidine phosphorothioate
  modified_base 2: mod_base = OTHER; note = 2'-O-Methyl-adenosine phosphorothioate
  modified_base 3: mod_base = OTHER; note = 2'-O-Methyl-guanosine
  modified_base 21: mod_base = OTHER; note = 2'-O-Methyl-guanosine
  modified_base 25: mod_base = OTHER; note = uridine phosphorothioate
  modified_base 28: mod_base = OTHER; note = 2'-O-Methyl-adenosine
  modified_base 29: mod_base = OTHER; note = 2'-O-Methyl-guanosine
  modified_base 30: mod_base = OTHER; note = 2'-O-Methyl-cytidine
  modified_base 31: mod_base = OTHER; note = 2'-O-Methyl-uridine
  modified_base 32: mod_base = OTHER; note = 2'-O-Methyl-adenosine
  modified_base 34: mod_base = OTHER; note = 2'-O-Methyl-adenosine
  modified_base 35: mod_base = OTHER; note = 2'-O-Methyl-adenosine
  modified_base 36: mod_base = OTHER; note = 2'-O-Methyl-adenosine
  modified_base 37: mod_base = OTHER; note = 2'-O-Methyl-uridine
  modified_base 38: mod_base = OTHER; note = 2'-O-Methyl-adenosine
  modified_base 39: mod_base = OTHER; note = 2'-O-Methyl-guanosine
  modified_base 40: mod_base = OTHER; note = 2'-O-Methyl-cytidine
  modified_base 41: mod_base = OTHER; note = 2'-O-Methyl-adenosine
  modified_base 42: mod_base = OTHER; note = 2'-O-Methyl-adenosine
  modified_base 45: mod_base = OTHER; note = uridine phosphorothioate
  modified_base 46: mod_base = OTHER; note = 2'-O-Methyl-adenosine
  modified_base 48: mod_base = OTHER; note = 2'-O-Methyl-adenosine
  modified_base 50: mod_base = OTHER; note = 2'-O-Methyl-uridine
  modified_base 52: mod_base = OTHER; note = 2'-O-Methyl-adenosine
  modified_base 53: mod_base = OTHER; note = 2'-O-Methyl-guanosine
  modified_base 54: mod_base = OTHER; note = 2'-O-Methyl-guanosine
  modified_base 57: mod_base = OTHER; note = 2'-O-Methyl-adenosine
  modified_base 61: mod_base = OTHER; note = 2'-O-Methyl-cytidine
  modified_base 64: mod_base = OTHER; note = uridine phosphorothioate
  modified_base 66: mod_base = OTHER; note = 2'-O-Methyl-uridine
  modified_base 67: mod_base = OTHER; note = 2'-O-Methyl-cytidine
  modified_base 70: mod_base = OTHER; note = 2'-O-Methyl-cytidine
  modified_base 71: mod_base = OTHER; note = 2'-O-Methyl-uridine
  modified_base 72: mod_base = OTHER; note = 2'-O-Methyl-uridine
  modified_base 73: mod_base = OTHER; note = 2'-O-Methyl-guanosine
  modified_base 74: mod_base = OTHER; note = 2'-O-Methyl-adenosine
  modified_base 75: mod_base = OTHER; note = 2'-O-Methyl-adenosine
  modified_base 76: mod_base = OTHER; note = 2'-O-Methyl-adenosine
  modified_base 77: mod_base = OTHER; note = 2'-O-Methyl-adenosine
  modified_base 78: mod_base = OTHER; note = 2'-O-Methyl-adenosine
  modified_base 79: mod_base = OTHER; note = 2'-O-Methyl-guanosine
  modified_base 80: mod_base = OTHER; note = 2'-O-Methyl-uridine
  modified_base 82: mod_base = OTHER; note = 2'-O-Methyl-guanosine
  modified_base 83: mod_base = OTHER; note = 2'-O-Methyl-cytidine
  modified_base 84: mod_base = OTHER; note = 2'-O-Methyl-adenosine
  modified_base 85: mod_base = OTHER; note = 2'-O-Methyl-cytidine
  modified_base 86: mod_base = OTHER; note = 2'-O-Methyl-cytidine
  modified_base 87: mod_base = OTHER; note = 2'-O-Methyl-guanosine
  modified_base 89: mod_base = OTHER; note = 2'-O-Methyl-guanosine
  modified_base 92: mod_base = OTHER; note = 2'-O-Methyl-guanosine
  modified_base 93: mod_base = OTHER; note = 2'-O-Methyl-guanosine
  modified_base 94: mod_base = OTHER; note = 2'-O-Methyl-uridine
  modified_base 95: mod_base = OTHER; note = 2'-O-Methyl-guanosine
  modified_base 96: mod_base = OTHER; note = 2'-O-Methyl-cytidine
  modified_base 97: mod_base = OTHER; note = 2'-O-Methyl-uridine
  modified_base 98: mod_base = OTHER; note = 2'-O-Methyl-uridine phosphorothioate
  modified_base 99: mod_base = OTHER; note = 2'-O-Methyl-uridine phosphorothioate
  modified_base 100: mod_base = OTHER; note = 2'-O-Methyl-uridine

SEQ ID NO: 2757 - RNA, 103 nt, synthetic construct; identical to SEQ ID NO: 1700
  source 1..103: mol_type = other RNA
  modified_base 1: mod_base = OTHER; note = 2'-O-Methyl-cytidine phosphorothioate
  modified_base 2: mod_base = OTHER; note = 2'-O-Methyl-adenosine phosphorothioate
  modified_base 3: mod_base = OTHER; note = 2'-O-Methyl-guanosine
  modified_base 21: mod_base = OTHER; note = 2'-O-Methyl-guanosine
  modified_base 25: mod_base = OTHER; note = uridine phosphorothioate
  modified_base 28: mod_base = OTHER; note = 2'-O-Methyl-adenosine
  modified_base 29: mod_base = OTHER; note = 2'-O-Methyl-guanosine
  modified_base 30: mod_base = OTHER; note = 2'-O-Methyl-cytidine
  modified_base 31: mod_base = OTHER; note = 2'-O-Methyl-uridine
  modified_base 32: mod_base = OTHER; note = 2'-O-Methyl-adenosine
  modified_base 34: mod_base = OTHER; note = 2'-O-Methyl-adenosine
  modified_base 35: mod_base = OTHER; note = 2'-O-Methyl-adenosine
  modified_base 36: mod_base = OTHER; note = 2'-O-Methyl-adenosine
  modified_base 37: mod_base = OTHER; note = 2'-O-Methyl-uridine
  modified_base 38: mod_base = OTHER; note = 2'-O-Methyl-adenosine
  modified_base 39: mod_base = OTHER; note = 2'-O-Methyl-guanosine
  modified_base 40: mod_base = OTHER; note = 2'-O-Methyl-cytidine
  modified_base 41: mod_base = OTHER; note = 2'-O-Methyl-adenosine
  modified_base 42: mod_base = OTHER; note = 2'-O-Methyl-adenosine
  modified_base 45: mod_base = OTHER; note = uridine phosphorothioate
  modified_base 46: mod_base = OTHER; note = 2'-O-Methyl-adenosine
  modified_base 48: mod_base = OTHER; note = 2'-O-Methyl-adenosine
  modified_base 50: mod_base = OTHER; note = 2'-O-Methyl-uridine
  modified_base 52: mod_base = OTHER; note = 2'-O-Methyl-adenosine
  modified_base 53: mod_base = OTHER; note = 2'-O-Methyl-guanosine
  modified_base 54: mod_base = OTHER; note = 2'-O-Methyl-guanosine
  modified_base 57: mod_base = OTHER; note = 2'-O-Methyl-adenosine
  modified_base 61: mod_base = OTHER; note = 2'-O-Methyl-cytidine
  modified_base 64: mod_base = OTHER; note = uridine phosphorothioate
  modified_base 66: mod_base = OTHER; note = 2'-O-Methyl-uridine
  modified_base 67: mod_base = OTHER; note = 2'-O-Methyl-cytidine
  modified_base 70: mod_base = OTHER; note = 2'-O-Methyl-cytidine
  modified_base 71: mod_base = OTHER; note = 2'-O-Methyl-uridine
  modified_base 72: mod_base = OTHER; note = 2'-O-Methyl-uridine
  modified_base 73: mod_base = OTHER; note = 2'-O-Methyl-guanosine
  modified_base 74: mod_base = OTHER; note = 2'-O-Methyl-adenosine
  modified_base 75: mod_base = OTHER; note = 2'-O-Methyl-adenosine
  modified_base 76: mod_base = OTHER; note = 2'-O-Methyl-adenosine
  modified_base 77: mod_base = OTHER; note = 2'-O-Methyl-adenosine
  modified_base 78: mod_base = OTHER; note = 2'-O-Methyl-adenosine
  modified_base 79: mod_base = OTHER; note = 2'-O-Methyl-guanosine
  modified_base 80: mod_base = OTHER; note = 2'-O-Methyl-uridine
  modified_base 82: mod_base = OTHER; note = 2'-O-Methyl-guanosine
  modified_base 83: mod_base = OTHER; note = 2'-O-Methyl-cytidine
  modified_base 84: mod_base = OTHER; note = 2'-O-Methyl-adenosine
  modified_base 85: mod_base = OTHER; note = 2'-O-Methyl-cytidine
  modified_base 86: mod_base = OTHER; note = 2'-O-Methyl-cytidine
  modified_base 87: mod_base = OTHER; note = 2'-O-Methyl-guanosine
  modified_base 89: mod_base = OTHER; note = 2'-O-Methyl-guanosine
  modified_base 91: mod_base = OTHER; note = 2'-O-Methyl-cytidine
  modified_base 92: mod_base = OTHER; note = 2'-O-Methyl-guanosine
  modified_base 93: mod_base = OTHER; note = 2'-O-Methyl-guanosine
  modified_base 94: mod_base = OTHER; note = 2'-O-Methyl-uridine
  modified_base 95: mod_base = OTHER; note = 2'-O-Methyl-guanosine
  modified_base 96: mod_base = OTHER; note = 2'-O-Methyl-cytidine
  modified_base 97: mod_base = OTHER; note = 2'-O-Methyl-uridine
  modified_base 98: mod_base = OTHER; note = 2'-O-Methyl-uridine phosphorothioate
  modified_base 99: mod_base = OTHER; note = 2'-O-Methyl-uridine phosphorothioate
  modified_base 100: mod_base = OTHER; note = 2'-O-Methyl-uridine

SEQ ID NO: 2758 - RNA, 103 nt, synthetic construct; identical to SEQ ID NO: 1700
  source 1..103: mol_type = other RNA
  modified_base 1: mod_base = OTHER; note = 2'-O-Methyl-cytidine phosphorothioate
  modified_base 2: mod_base = OTHER; note = 2'-O-Methyl-adenosine phosphorothioate
  modified_base 3: mod_base = OTHER; note = 2'-O-Methyl-guanosine
  modified_base 21: mod_base = OTHER; note = 2'-O-Methyl-guanosine
  modified_base 25: mod_base = OTHER; note = uridine phosphorothioate
  modified_base 28: mod_base = OTHER; note = 2'-O-Methyl-adenosine
  modified_base 29: mod_base = OTHER; note = 2'-O-Methyl-guanosine
  modified_base 30: mod_base = OTHER; note = 2'-O-Methyl-cytidine
  modified_base 31: mod_base = OTHER; note = 2'-O-Methyl-uridine
  modified_base 32: mod_base = OTHER; note = 2'-O-Methyl-adenosine
  modified_base 34: mod_base = OTHER; note = 2'-O-Methyl-adenosine
  modified_base 35: mod_base = OTHER; note = 2'-O-Methyl-adenosine
  modified_base 36: mod_base = OTHER; note = 2'-O-Methyl-adenosine
  modified_base 37: mod_base = OTHER; note = 2'-O-Methyl-uridine
  modified_base 38: mod_base = OTHER; note = 2'-O-Methyl-adenosine
  modified_base 39: mod_base = OTHER; note = 2'-O-Methyl-guanosine
  modified_base 40: mod_base = OTHER; note = 2'-O-Methyl-cytidine
  modified_base 41: mod_base = OTHER; note = 2'-O-Methyl-adenosine
  modified_base 42: mod_base = OTHER; note = 2'-O-Methyl-adenosine
  modified_base 45: mod_base = OTHER; note = uridine phosphorothioate
  modified_base 46: mod_base = OTHER; note = 2'-O-Methyl-adenosine
  modified_base 48: mod_base = OTHER; note = 2'-O-Methyl-adenosine
  modified_base 50: mod_base = OTHER; note = 2'-O-Methyl-uridine
  modified_base 52: mod_base = OTHER; note = 2'-O-Methyl-adenosine
  modified_base 53: mod_base = OTHER; note = 2'-O-Methyl-guanosine
  modified_base 54: mod_base = OTHER; note = 2'-O-Methyl-guanosine
  modified_base 55: mod_base = OTHER; note = 2'-O-Methyl-cytidine
  modified_base 56: mod_base = OTHER; note = 2'-O-Methyl-uridine
  modified_base 57: mod_base = OTHER; note = 2'-O-Methyl-adenosine
  modified_base 60: mod_base = OTHER; note = 2'-O-Methyl-cytidine
  modified_base 61: mod_base = OTHER; note = 2'-O-Methyl-cytidine
  modified_base 64: mod_base = OTHER; note = uridine phosphorothioate
  modified_base 66: mod_base = OTHER; note = 2'-O-Methyl-uridine
  modified_base 67: mod_base = OTHER; note = 2'-O-Methyl-cytidine
  modified_base 70: mod_base = OTHER; note = 2'-O-Methyl-cytidine
  modified_base 71: mod_base = OTHER; note = 2'-O-Methyl-uridine
  modified_base 72: mod_base = OTHER; note = 2'-O-Methyl-uridine
  modified_base 74: mod_base = OTHER; note = 2'-O-Methyl-adenosine
  modified_base 75: mod_base = OTHER; note = 2'-O-Methyl-adenosine
  modified_base 76: mod_base = OTHER; note = 2'-O-Methyl-adenosine
  modified_base 77: mod_base = OTHER; note = 2'-O-Methyl-adenosine
  modified_base 78: mod_base = OTHER; note = 2'-O-Methyl-adenosine
  modified_base 79: mod_base = OTHER; note = 2'-O-Methyl-guanosine
  modified_base 80: mod_base = OTHER; note = 2'-O-Methyl-uridine
  modified_base 82: mod_base = OTHER; note = 2'-O-Methyl-guanosine
  modified_base 83: mod_base = OTHER; note = 2'-O-Methyl-cytidine
  modified_base 84: mod_base = OTHER; note = 2'-O-Methyl-adenosine
  modified_base 85: mod_base = OTHER; note = 2'-O-Methyl-cytidine
  modified_base 86: mod_base = OTHER; note = 2'-O-Methyl-cytidine
  modified_base 87: mod_base = OTHER; note = 2'-O-Methyl-guanosine
  modified_base 89: mod_base = OTHER; note = 2'-O-Methyl-guanosine
  modified_base 92: mod_base = OTHER; note = 2'-O-Methyl-guanosine
  modified_base 93: mod_base = OTHER; note = 2'-O-Methyl-guanosine
  modified_base 94: mod_base = OTHER; note = 2'-O-Methyl-uridine
  modified_base 95: mod_base = OTHER; note = 2'-O-Methyl-guanosine
  modified_base 96: mod_base = OTHER; note = 2'-O-Methyl-cytidine
  modified_base 97: mod_base = OTHER; note = 2'-O-Methyl-uridine
  modified_base 98: mod_base = OTHER; note = 2'-O-Methyl-uridine phosphorothioate
  modified_base 99: mod_base = OTHER; note = 2'-O-Methyl-uridine phosphorothioate
  modified_base 100: mod_base = OTHER; note = 2'-O-Methyl-uridine

SEQ ID NO: 2759 - RNA, 103 nt, synthetic construct; identical to SEQ ID NO: 1795
  source 1..103: mol_type = other RNA
  modified_base 1: mod_base = OTHER; note = 2'-O-Methyl-cytidine phosphorothioate
  modified_base 2: mod_base = OTHER; note = 2'-O-Methyl-cytidine phosphorothioate
  modified_base 3: mod_base = OTHER; note = 2'-O-Methyl-cytidine phosphorothioate
  modified_base 21: mod_base = OTHER; note = 2'-O-Methyl-guanosine
  modified_base 28: mod_base = OTHER; note = 2'-O-Methyl-adenosine
  modified_base 29: mod_base = OTHER; note = 2'-O-Methyl-guanosine
  modified_base 30: mod_base = OTHER; note = 2'-O-Methyl-cytidine
  modified_base 31: mod_base = OTHER; note = 2'-O-Methyl-uridine
  modified_base 32: mod_base = OTHER; note = 2'-O-Methyl-adenosine
  modified_base 33: mod_base = OTHER; note = 2'-O-Methyl-guanosine
  modified_base 34: mod_base = OTHER; note = 2'-O-Methyl-adenosine
  modified_base 35: mod_base = OTHER; note = 2'-O-Methyl-adenosine
  modified_base 36: mod_base = OTHER; note = 2'-O-Methyl-adenosine
  modified_base 37: mod_base = OTHER; note = 2'-O-Methyl-uridine
  modified_base 38: mod_base = OTHER; note = 2'-O-Methyl-adenosine
  modified_base 39: mod_base = OTHER; note = 2'-O-Methyl-guanosine
  modified_base 40: mod_base = OTHER; note = 2'-O-Methyl-cytidine
  modified_base 41: mod_base = OTHER; note = 2'-O-Methyl-adenosine
  modified_base 42: mod_base = OTHER; note = 2'-O-Methyl-adenosine
  modified_base 46: mod_base = OTHER; note = 2'-O-Methyl-adenosine
  modified_base 48: mod_base = OTHER; note = 2'-O-Methyl-adenosine
  modified_base 50: mod_base = OTHER; note = 2'-O-Methyl-uridine
  modified_base 52: mod_base = OTHER; note = 2'-O-Methyl-adenosine
  modified_base 53: mod_base = OTHER; note = 2'-O-Methyl-guanosine
  modified_base 54: mod_base = OTHER; note = 2'-O-Methyl-guanosine
  modified_base 55: mod_base = OTHER; note = 2'-O-Methyl-cytidine
  modified_base 56: mod_base = OTHER; note = 2'-O-Methyl-uridine
  modified_base 57: mod_base = OTHER; note = 2'-O-Methyl-adenosine
  modified_base 60: mod_base = OTHER; note = 2'-O-Methyl-cytidine
  modified_base 61: mod_base = OTHER; note = 2'-O-Methyl-cytidine
  modified_base 66: mod_base = OTHER; note = 2'-O-Methyl-uridine
  modified_base 67: mod_base = OTHER; note = 2'-O-Methyl-cytidine
  modified_base 70: mod_base = OTHER; note = 2'-O-Methyl-cytidine
  modified_base 71: mod_base = OTHER; note = 2'-O-Methyl-uridine
  modified_base 72: mod_base = OTHER; note = 2'-O-Methyl-uridine
  modified_base 73: mod_base = OTHER; note = 2'-O-Methyl-guanosine
  modified_base 74: mod_base = OTHER; note = 2'-O-Methyl-adenosine
  modified_base 75: mod_base = OTHER; note = 2'-O-Methyl-adenosine
  modified_base 76: mod_base = OTHER; note = 2'-O-Methyl-adenosine
  modified_base 77: mod_base = OTHER; note = 2'-O-Methyl-adenosine
  modified_base 78: mod_base = OTHER; note = 2'-O-Methyl-adenosine
  modified_base 79: mod_base = OTHER; note = 2'-O-Methyl-guanosine
  modified_base 80: mod_base = OTHER; note = 2'-O-Methyl-uridine
  modified_base 81: mod_base = OTHER; note = 2'-O-Methyl-guanosine
  modified_base 83: mod_base = OTHER; note = 2'-O-Methyl-cytidine
  modified_base 84: mod_base = OTHER; note = 2'-O-Methyl-adenosine
  modified_base 85: mod_base = OTHER; note = 2'-O-Methyl-cytidine
  modified_base 86: mod_base = OTHER; note = 2'-O-Methyl-cytidine
  modified_base 87: mod_base = OTHER; note = 2'-O-Methyl-guanosine
  modified_base 88: mod_base = OTHER; note = 2'-O-Methyl-adenosine
  modified_base 89: mod_base = OTHER; note = 2'-O-Methyl-guanosine
  modified_base 90: mod_base = OTHER; note = 2'-O-Methyl-uridine
  modified_base 91: mod_base = OTHER; note = 2'-O-Methyl-cytidine
  modified_base 92: mod_base = OTHER; note = 2'-O-Methyl-guanosine
  modified_base 93: mod_base = OTHER; note = 2'-O-Methyl-guanosine
  modified_base 94: mod_base = OTHER; note = 2'-O-Methyl-uridine
  modified_base 95: mod_base = OTHER; note = 2'-O-Methyl-guanosine
  modified_base 96: mod_base = OTHER; note = 2'-O-Methyl-cytidine
  modified_base 97: mod_base = OTHER; note = 2'-O-Methyl-uridine phosphorothioate
  modified_base 98: mod_base = OTHER; note = 2'-O-Methyl-uridine phosphorothioate
  modified_base 99: mod_base = OTHER; note = 2'-O-Methyl-uridine phosphorothioate
  modified_base 100: mod_base = OTHER; note = 2'-O-Methyl-uridine
  misc_difference 101: note = a, c, g, inosine, u, deoxyadenosine, deoxyguanosine, deoxycytidine, deoxyinosine, thymine, ribonebularine, 2'-O-methylnebularine, or 2'-deoxynebularine
  misc_difference 102: note = a, c, g, inosine, u, deoxyadenosine, deoxyguanosine, deoxycytidine, deoxyinosine, thymine, ribonebularine, 2'-O-methylnebularine, or 2'-deoxynebularine
  misc_difference 103: note = a, c, g, inosine, u, deoxyadenosine, deoxyguanosine, deoxycytidine, deoxyinosine, thymine, ribonebularine, 2'-O-methylnebularine, or 2'-deoxynebularine

SEQ ID NO: 2760 - RNA, 103 nt, synthetic construct; identical to SEQ ID NO: 1795
  source 1..103: mol_type = other RNA
  modified_base 1: mod_base = OTHER; note = 2'-O-Methyl-cytidine phosphorothioate
  modified_base 2: mod_base = OTHER; note = 2'-O-Methyl-cytidine phosphorothioate
  modified_base 3: mod_base = OTHER; note = 2'-O-Methyl-cytidine phosphorothioate
  modified_base 21: mod_base = OTHER; note = 2'-O-Methyl-guanosine
  modified_base 28: mod_base = OTHER; note = 2'-O-Methyl-adenosine
  modified_base 29: mod_base = OTHER; note = 2'-O-Methyl-guanosine
  modified_base 30: mod_base = OTHER; note = 2'-O-Methyl-cytidine
  modified_base 31: mod_base = OTHER; note = 2'-O-Methyl-uridine
  modified_base 32: mod_base = OTHER; note = 2'-O-Methyl-adenosine
  modified_base 34: mod_base = OTHER; note = 2'-O-Methyl-adenosine
  modified_base 35: mod_base = OTHER; note = 2'-O-Methyl-adenosine
  modified_base 36: mod_base = OTHER; note = 2'-O-Methyl-adenosine
  modified_base 37: mod_base = OTHER; note = 2'-O-Methyl-uridine
  modified_base 38: mod_base = OTHER; note = 2'-O-Methyl-adenosine
  modified_base 39: mod_base = OTHER; note = 2'-O-Methyl-guanosine
  modified_base 40: mod_base = OTHER; note = 2'-O-Methyl-cytidine
  modified_base 41: mod_base = OTHER; note = 2'-O-Methyl-adenosine
  modified_base 42: mod_base = OTHER; note = 2'-O-Methyl-adenosine
  modified_base 46: mod_base = OTHER; note = 2'-O-Methyl-adenosine
  modified_base 48: mod_base = OTHER; note = 2'-O-Methyl-adenosine
  modified_base 50: mod_base = OTHER; note = 2'-O-Methyl-uridine
  modified_base 52: mod_base = OTHER; note = 2'-O-Methyl-adenosine
  modified_base 53: mod_base = OTHER; note = 2'-O-Methyl-guanosine
  modified_base 54: mod_base = OTHER; note = 2'-O-Methyl-guanosine
  modified_base 55: mod_base = OTHER; note = 2'-O-Methyl-cytidine
  modified_base 56: mod_base = OTHER; note = 2'-O-Methyl-uridine
  modified_base 57: mod_base = OTHER; note = 2'-O-Methyl-adenosine
  modified_base 60: mod_base = OTHER; note = 2'-O-Methyl-cytidine
  modified_base 61: mod_base = OTHER; note = 2'-O-Methyl-cytidine
  modified_base 66: mod_base = OTHER; note = 2'-O-Methyl-uridine
  modified_base 67: mod_base = OTHER; note = 2'-O-Methyl-cytidine
  modified_base 70: mod_base = OTHER; note = 2'-O-Methyl-cytidine
  modified_base 71: mod_base = OTHER; note = 2'-O-Methyl-uridine
  modified_base 72: mod_base = OTHER; note = 2'-O-Methyl-uridine
  modified_base 74: mod_base = OTHER; note = 2'-O-Methyl-adenosine
  modified_base 75: mod_base = OTHER; note = 2'-O-Methyl-adenosine
  modified_base 76: mod_base = OTHER; note = 2'-O-Methyl-adenosine
  modified_base 77: mod_base = OTHER; note = 2'-O-Methyl-adenosine
  modified_base 78: mod_base = OTHER; note = 2'-O-Methyl-adenosine
  modified_base 79: mod_base = OTHER; note = 2'-O-Methyl-guanosine
  modified_base 80: mod_base = OTHER; note = 2'-O-Methyl-uridine
  modified_base 81: mod_base = OTHER; note = 2'-O-Methyl-guanosine
  modified_base 83: mod_base = OTHER; note = 2'-O-Methyl-cytidine
  modified_base 84: mod_base = OTHER; note = 2'-O-Methyl-adenosine
  modified_base 85: mod_base = OTHER; note = 2'-O-Methyl-cytidine
  modified_base 86: mod_base = OTHER; note = 2'-O-Methyl-cytidine
  modified_base 87: mod_base = OTHER; note = 2'-O-Methyl-guanosine
  modified_base 88: mod_base = OTHER; note = 2'-O-Methyl-adenosine
  modified_base 89: mod_base = OTHER; note = 2'-O-Methyl-guanosine
  modified_base 90: mod_base = OTHER; note = 2'-O-Methyl-uridine
  modified_base 91: mod_base = OTHER; note = 2'-O-Methyl-cytidine
  modified_base 92: mod_base = OTHER; note = 2'-O-Methyl-guanosine
  modified_base 93: mod_base = OTHER; note = 2'-O-Methyl-guanosine
  modified_base 94: mod_base = OTHER; note = 2'-O-Methyl-uridine
  modified_base 95: mod_base = OTHER; note = 2'-O-Methyl-guanosine
  modified_base 96: mod_base = OTHER; note = 2'-O-Methyl-cytidine
  modified_base 97: mod_base = OTHER; note = 2'-O-Methyl-uridine phosphorothioate
  modified_base 98: mod_base = OTHER; note = 2'-O-Methyl-uridine phosphorothioate
  modified_base 99: mod_base = OTHER; note = 2'-O-Methyl-uridine phosphorothioate
  modified_base 100: mod_base = OTHER; note = 2'-O-Methyl-uridine
  misc_difference 101: note = a, c, g, inosine, u, deoxyadenosine, deoxyguanosine, deoxycytidine, deoxyinosine, thymine, ribonebularine, 2'-O-methylnebularine, or 2'-deoxynebularine
  misc_difference 102: note = a, c, g, inosine, u, deoxyadenosine, deoxyguanosine, deoxycytidine, deoxyinosine, thymine, ribonebularine, 2'-O-methylnebularine, or 2'-deoxynebularine
  misc_difference 103: note = a, c, g, inosine, u, deoxyadenosine, deoxyguanosine, deoxycytidine, deoxyinosine, thymine, ribonebularine, 2'-O-methylnebularine, or 2'-deoxynebularine

SEQ ID NO: 2761 - RNA, 103 nt, synthetic construct; identical to SEQ ID NO: 1796
  source 1..103: mol_type = other RNA
  modified_base 1: mod_base = OTHER; note = 2'-O-Methyl-guanosine phosphorothioate
  modified_base 2: mod_base = OTHER; note = 2'-O-Methyl-adenosine phosphorothioate
  modified_base 3: mod_base = OTHER; note = 2'-O-Methyl-guanosine phosphorothioate
  modified_base 21: mod_base = OTHER; note = 2'-O-Methyl-guanosine
  modified_base 28: mod_base = OTHER; note = 2'-O-Methyl-adenosine
  modified_base 29: mod_base = OTHER; note = 2'-O-Methyl-guanosine
  modified_base 30: mod_base = OTHER; note = 2'-O-Methyl-cytidine
  modified_base 31: mod_base = OTHER; note = 2'-O-Methyl-uridine
  modified_base 32: mod_base = OTHER; note = 2'-O-Methyl-adenosine
  modified_base 33: mod_base = OTHER; note = 2'-O-Methyl-guanosine
  modified_base 34: mod_base = OTHER; note = 2'-O-Methyl-adenosine
  modified_base 35: mod_base = OTHER; note = 2'-O-Methyl-adenosine
  modified_base 36: mod_base = OTHER; note = 2'-O-Methyl-adenosine
  modified_base 37: mod_base = OTHER; note = 2'-O-Methyl-uridine
  modified_base 38: mod_base = OTHER; note = 2'-O-Methyl-adenosine
  modified_base 39: mod_base = OTHER; note = 2'-O-Methyl-guanosine
  modified_base 40: mod_base = OTHER; note = 2'-O-Methyl-cytidine
  modified_base 41: mod_base = OTHER; note = 2'-O-Methyl-adenosine
  modified_base 42: mod_base = OTHER; note = 2'-O-Methyl-adenosine
  modified_base 46: mod_base = OTHER; note = 2'-O-Methyl-adenosine
  modified_base 48: mod_base = OTHER; note = 2'-O-Methyl-adenosine
  modified_base 50: mod_base = OTHER; note = 2'-O-Methyl-uridine
  modified_base 52: mod_base = OTHER; note = 2'-O-Methyl-adenosine
  modified_base 53: mod_base = OTHER; note = 2'-O-Methyl-guanosine
  modified_base 54: mod_base = OTHER; note = 2'-O-Methyl-guanosine
  modified_base 55: mod_base = OTHER; note = 2'-O-Methyl-cytidine
  modified_base 56: mod_base = OTHER; note = 2'-O-Methyl-uridine
  modified_base 57: mod_base = OTHER; note = 2'-O-Methyl-adenosine
  modified_base 60: mod_base = OTHER; note = 2'-O-Methyl-cytidine
  modified_base 61: mod_base = OTHER; note = 2'-O-Methyl-cytidine
  modified_base 66: mod_base = OTHER; note = 2'-O-Methyl-uridine
  modified_base 67: mod_base = OTHER; note = 2'-O-Methyl-cytidine
  modified_base 70: mod_base = OTHER; note = 2'-O-Methyl-cytidine
  modified_base 71: mod_base = OTHER; note = 2'-O-Methyl-uridine
  modified_base 72: mod_base = OTHER; note = 2'-O-Methyl-uridine
  modified_base 73: mod_base = OTHER; note = 2'-O-Methyl-guanosine
  modified_base 74: mod_base = OTHER; note = 2'-O-Methyl-adenosine
  modified_base 75: mod_base = OTHER; note = 2'-O-Methyl-adenosine
  modified_base 76: mod_base = OTHER; note = 2'-O-Methyl-adenosine
  modified_base 77: mod_base = OTHER; note = 2'-O-Methyl-adenosine
  modified_base 78: mod_base = OTHER; note = 2'-O-Methyl-adenosine
  modified_base 79: mod_base = OTHER; note = 2'-O-Methyl-guanosine
  modified_base 80: mod_base = OTHER; note = 2'-O-Methyl-uridine
  modified_base 81: mod_base = OTHER; note = 2'-O-Methyl-guanosine
  modified_base 83: mod_base = OTHER; note = 2'-O-Methyl-cytidine
  modified_base 84: mod_base = OTHER; note = 2'-O-Methyl-adenosine
  modified_base 85: mod_base = OTHER; note = 2'-O-Methyl-cytidine
  modified_base 86: mod_base = OTHER; note = 2'-O-Methyl-cytidine
  modified_base 87: mod_base = OTHER; note = 2'-O-Methyl-guanosine
  modified_base 88: mod_base = OTHER; note = 2'-O-Methyl-adenosine
  modified_base 89: mod_base = OTHER; note = 2'-O-Methyl-guanosine
  modified_base 90: mod_base = OTHER; note = 2'-O-Methyl-uridine
  modified_base 91: mod_base = OTHER; note = 2'-O-Methyl-cytidine
  modified_base 92: mod_base = OTHER; note = 2'-O-Methyl-guanosine
  modified_base 93: mod_base = OTHER; note = 2'-O-Methyl-guanosine
  modified_base 94: mod_base = OTHER; note = 2'-O-Methyl-uridine
  modified_base 95: mod_base = OTHER; note = 2'-O-Methyl-guanosine
  modified_base 96: mod_base = OTHER; note = 2'-O-Methyl-cytidine
  modified_base 97: mod_base = OTHER; note = 2'-O-Methyl-uridine phosphorothioate
  modified_base 98: mod_base = OTHER; note = 2'-O-Methyl-uridine phosphorothioate
  modified_base 99: mod_base = OTHER; note = 2'-O-Methyl-uridine phosphorothioate
  modified_base 100: mod_base = OTHER; note = 2'-O-Methyl-uridine
  misc_difference 101: note = a, c, g, inosine, u, deoxyadenosine, deoxyguanosine, deoxycytidine, deoxyinosine, thymine, ribonebularine, 2'-O-methylnebularine, or 2'-deoxynebularine
  misc_difference 102: note = a, c, g, inosine, u, deoxyadenosine, deoxyguanosine, deoxycytidine, deoxyinosine, thymine, ribonebularine, 2'-O-methylnebularine, or 2'-deoxynebularine
  misc_difference 103: note = a, c, g, inosine, u, deoxyadenosine, deoxyguanosine, deoxycytidine, deoxyinosine, thymine, ribonebularine, 2'-O-methylnebularine, or 2'-deoxynebularine

SEQ ID NO: 2762 - RNA, 103 nt, synthetic construct; identical to SEQ ID NO: 1796
  source 1..103: mol_type = other RNA
  modified_base 1: mod_base = OTHER; note = 2'-O-Methyl-guanosine phosphorothioate
  modified_base 2: mod_base = OTHER; note = 2'-O-Methyl-adenosine phosphorothioate
  modified_base 3: mod_base = OTHER; note = 2'-O-Methyl-guanosine phosphorothioate
  modified_base 21: mod_base = OTHER; note = 2'-O-Methyl-guanosine
  modified_base 28: mod_base = OTHER; note = 2'-O-Methyl-adenosine
  modified_base 29: mod_base = OTHER; note = 2'-O-Methyl-guanosine
  modified_base 30: mod_base = OTHER; note = 2'-O-Methyl-cytidine
  modified_base 31: mod_base = OTHER; note = 2'-O-Methyl-uridine
  modified_base 32: mod_base = OTHER; note = 2'-O-Methyl-adenosine
  modified_base 34: mod_base = OTHER; note = 2'-O-Methyl-adenosine
  modified_base 35: mod_base = OTHER; note = 2'-O-Methyl-adenosine
  modified_base 36: mod_base = OTHER; note = 2'-O-Methyl-adenosine
  modified_base 37: mod_base = OTHER; note = 2'-O-Methyl-uridine
  modified_base 38: mod_base = OTHER; note = 2'-O-Methyl-adenosine
  modified_base 39: mod_base = OTHER; note = 2'-O-Methyl-guanosine
  modified_base 40: mod_base = OTHER; note = 2'-O-Methyl-cytidine
  modified_base 41: mod_base = OTHER; note = 2'-O-Methyl-adenosine
  modified_base 42: mod_base = OTHER; note = 2'-O-Methyl-adenosine
  modified_base 46: mod_base = OTHER; note = 2'-O-Methyl-adenosine
  modified_base 48: mod_base = OTHER; note = 2'-O-Methyl-adenosine
  modified_base 50: mod_base = OTHER; note = 2'-O-Methyl-uridine
  modified_base 52: mod_base = OTHER; note = 2'-O-Methyl-adenosine
  modified_base 53: mod_base = OTHER; note = 2'-O-Methyl-guanosine
  modified_base 54: mod_base = OTHER; note = 2'-O-Methyl-guanosine
  modified_base 55: mod_base = OTHER; note = 2'-O-Methyl-cytidine
  modified_base 56: mod_base = OTHER; note = 2'-O-Methyl-uridine
  modified_base 57: mod_base = OTHER; note = 2'-O-Methyl-adenosine
  modified_base 60: mod_base = OTHER; note = 2'-O-Methyl-cytidine
  modified_base 61: mod_base = OTHER; note = 2'-O-Methyl-cytidine
  modified_base 66: mod_base = OTHER; note = 2'-O-Methyl-uridine
  modified_base 67: mod_base = OTHER; note = 2'-O-Methyl-cytidine
  modified_base 70: mod_base = OTHER; note = 2'-O-Methyl-cytidine
  modified_base 71: mod_base = OTHER; note = 2'-O-Methyl-uridine
  modified_base 72: mod_base = OTHER; note = 2'-O-Methyl-uridine
  modified_base 74: mod_base = OTHER; note = 2'-O-Methyl-adenosine
  modified_base 75: mod_base = OTHER; note = 2'-O-Methyl-adenosine
  modified_base 76: mod_base = OTHER; note = 2'-O-Methyl-adenosine
  modified_base 77: mod_base = OTHER; note = 2'-O-Methyl-adenosine
  modified_base 78: mod_base = OTHER; note = 2'-O-Methyl-adenosine
  modified_base 79: mod_base = OTHER; note = 2'-O-Methyl-guanosine
  modified_base 80: mod_base = OTHER; note = 2'-O-Methyl-uridine
  modified_base 81: mod_base = OTHER; note = 2'-O-Methyl-guanosine
  modified_base 83: mod_base = OTHER; note = 2'-O-Methyl-cytidine
  modified_base 84: mod_base = OTHER; note = 2'-O-Methyl-adenosine
  modified_base 85: mod_base = OTHER; note = 2'-O-Methyl-cytidine
  modified_base 86: mod_base = OTHER; note = 2'-O-Methyl-cytidine
  modified_base 87: mod_base = OTHER; note = 2'-O-Methyl-guanosine
  modified_base 88: mod_base = OTHER; note = 2'-O-Methyl-adenosine
  modified_base 89: mod_base = OTHER; note = 2'-O-Methyl-guanosine
  modified_base 90: mod_base = OTHER; note = 2'-O-Methyl-uridine
  modified_base 91: mod_base = OTHER; note = 2'-O-Methyl-cytidine
  modified_base 92: mod_base = OTHER; note = 2'-O-Methyl-guanosine
  modified_base 93: mod_base = OTHER; note = 2'-O-Methyl-guanosine
  modified_base 94: mod_base = OTHER; note = 2'-O-Methyl-uridine
  modified_base 95: mod_base = OTHER; note = 2'-O-Methyl-guanosine
  modified_base 96: mod_base = OTHER; note = 2'-O-Methyl-cytidine
  modified_base 97: mod_base = OTHER; note = 2'-O-Methyl-uridine phosphorothioate
  modified_base 98: mod_base = OTHER; note = 2'-O-Methyl-uridine phosphorothioate
  modified_base 99: mod_base = OTHER; note = 2'-O-Methyl-uridine phosphorothioate
  modified_base 100: mod_base = OTHER; note = 2'-O-Methyl-uridine
  misc_difference 101: note = a, c, g, inosine, u, deoxyadenosine, deoxyguanosine, deoxycytidine, deoxyinosine, thymine, ribonebularine, 2'-O-methylnebularine, or 2'-deoxynebularine
  misc_difference 102: note = a, c, g, inosine, u, deoxyadenosine, deoxyguanosine, deoxycytidine, deoxyinosine, thymine, ribonebularine, 2'-O-methylnebularine, or 2'-deoxynebularine
  misc_difference 103: note = a, c, g, inosine, u, deoxyadenosine, deoxyguanosine, deoxycytidine, deoxyinosine, thymine, ribonebularine, 2'-O-methylnebularine, or 2'-deoxynebularine

SEQ ID NO: 2763 - RNA, 103 nt, synthetic construct; identical to SEQ ID NO: 1797
  source 1..103: mol_type = other RNA
  modified_base 1: mod_base = OTHER; note = 2'-O-Methyl-cytidine phosphorothioate
  modified_base 2: mod_base = OTHER; note = 2'-O-Methyl-adenosine phosphorothioate
  modified_base 3: mod_base = OTHER; note = 2'-O-Methyl-guanosine phosphorothioate
  modified_base 21: mod_base = OTHER; note = 2'-O-Methyl-guanosine
  modified_base 28: mod_base = OTHER; note = 2'-O-Methyl-adenosine
  modified_base 29: mod_base = OTHER; note = 2'-O-Methyl-guanosine
  modified_base 30: mod_base = OTHER; note = 2'-O-Methyl-cytidine
  modified_base 31: mod_base = OTHER; note = 2'-O-Methyl-uridine
  modified_base 32: mod_base = OTHER; note = 2'-O-Methyl-adenosine
  modified_base 33: mod_base = OTHER; note = 2'-O-Methyl-guanosine
  modified_base 34: mod_base = OTHER; note = 2'-O-Methyl-adenosine
  modified_base 35: mod_base = OTHER; note = 2'-O-Methyl-adenosine
  modified_base 36: mod_base = OTHER; note = 2'-O-Methyl-adenosine
  modified_base 37: mod_base = OTHER; note = 2'-O-Methyl-uridine
  modified_base 38: mod_base = OTHER; note = 2'-O-Methyl-adenosine
  modified_base 39: mod_base = OTHER; note = 2'-O-Methyl-guanosine
  modified_base 40: mod_base = OTHER; note = 2'-O-Methyl-cytidine
  modified_base 41: mod_base = OTHER; note = 2'-O-Methyl-adenosine
  modified_base 42: mod_base = OTHER; note = 2'-O-Methyl-adenosine
  modified_base 46: mod_base = OTHER; note = 2'-O-Methyl-adenosine
  modified_base 48: mod_base = OTHER; note = 2'-O-Methyl-adenosine
  modified_base 50: mod_base = OTHER; note = 2'-O-Methyl-uridine
  modified_base 52: mod_base = OTHER; note = 2'-O-Methyl-adenosine
  modified_base 53: mod_base = OTHER; note = 2'-O-Methyl-guanosine
  modified_base 54: mod_base = OTHER; note = 2'-O-Methyl-guanosine
  modified_base 57: mod_base = OTHER; note = 2'-O-Methyl-adenosine
  modified_base 61: mod_base = OTHER; note = 2'-O-Methyl-cytidine
  modified_base 66: mod_base = OTHER; note = 2'-O-Methyl-uridine
  modified_base 67: mod_base = OTHER; note = 2'-O-Methyl-cytidine
  modified_base 70: mod_base = OTHER; note = 2'-O-Methyl-cytidine
  modified_base 71: mod_base = OTHER; note = 2'-O-Methyl-uridine
  modified_base 72: mod_base = OTHER; note = 2'-O-Methyl-uridine
  modified_base 74: mod_base = OTHER; note = 2'-O-Methyl-adenosine
  modified_base 75: mod_base = OTHER; note = 2'-O-Methyl-adenosine
  modified_base 76: mod_base = OTHER; note = 2'-O-Methyl-adenosine
  modified_base 77: mod_base = OTHER; note = 2'-O-Methyl-adenosine
  modified_base 78: mod_base = OTHER; note = 2'-O-Methyl-adenosine
  modified_base 79: mod_base = OTHER; note = 2'-O-Methyl-guanosine
  modified_base 80: mod_base = OTHER; note = 2'-O-Methyl-uridine
  modified_base 82: mod_base = OTHER; note = 2'-O-Methyl-guanosine
  modified_base 83: mod_base = OTHER; note = 2'-O-Methyl-cytidine
  modified_base 84: mod_base = OTHER; note = 2'-O-Methyl-adenosine
  modified_base 85: mod_base = OTHER; note = 2'-O-Methyl-cytidine
  modified_base 86: mod_base = OTHER; note = 2'-O-Methyl-cytidine
  modified_base 87: mod_base = OTHER; note = 2'-O-Methyl-guanosine
  modified_base 89: mod_base = OTHER; note = 2'-O-Methyl-guanosine
  modified_base 92: mod_base = OTHER; note = 2'-O-Methyl-guanosine
  modified_base 93: mod_base = OTHER; note = 2'-O-Methyl-guanosine
  modified_base 94: mod_base = OTHER; note = 2'-O-Methyl-uridine
  modified_base 95: mod_base = OTHER; note = 2'-O-Methyl-guanosine
  modified_base 96: mod_base = OTHER; note = 2'-O-Methyl-cytidine
  modified_base 97: mod_base = OTHER; note = 2'-O-Methyl-uridine phosphorothioate
  modified_base 98: mod_base = OTHER; note = 2'-O-Methyl-uridine phosphorothioate
  modified_base 99: mod_base = OTHER; note = 2'-O-Methyl-uridine phosphorothioate
  modified_base 100: mod_base = OTHER; note = 2'-O-Methyl-uridine
  misc_difference 101: note = a, c, g, inosine, u, deoxyadenosine, deoxyguanosine, deoxycytidine, deoxyinosine, thymine, ribonebularine, 2'-O-methylnebularine, or 2'-deoxynebularine
  misc_difference 102: note = a, c, g, inosine, u, deoxyadenosine, deoxyguanosine, deoxycytidine, deoxyinosine, thymine, ribonebularine, 2'-O-methylnebularine, or 2'-deoxynebularine
  misc_difference 103: note = a, c, g, inosine, u, deoxyadenosine, deoxyguanosine, deoxycytidine, deoxyinosine, thymine, ribonebularine, 2'-O-methylnebularine, or 2'-deoxynebularine

SEQ ID NO: 2764 - RNA, 103 nt, synthetic construct; identical to SEQ ID NO: 1797
  source 1..103: mol_type = other RNA
  modified_base 1: mod_base = OTHER; note = 2'-O-Methyl-cytidine phosphorothioate
  modified_base 2: mod_base = OTHER; note = 2'-O-Methyl-adenosine phosphorothioate
  modified_base 3: mod_base = OTHER; note = 2'-O-Methyl-guanosine phosphorothioate
  modified_base 21: mod_base = OTHER; note = 2'-O-Methyl-guanosine
  modified_base 28: mod_base = OTHER; note = 2'-O-Methyl-adenosine
  modified_base 29: mod_base = OTHER; note = 2'-O-Methyl-guanosine
  modified_base 30: mod_base = OTHER; note = 2'-O-Methyl-cytidine
  modified_base 31: mod_base = OTHER; note = 2'-O-Methyl-uridine
  modified_base 32: mod_base = OTHER; note = 2'-O-Methyl-adenosine
  modified_base 33: mod_base = OTHER; note = 2'-O-Methyl-guanosine
  modified_base 34: mod_base = OTHER; note = 2'-O-Methyl-adenosine
  modified_base 35: mod_base = OTHER; note = 2'-O-Methyl-adenosine
  modified_base 36: mod_base = OTHER; note = 2'-O-Methyl-adenosine
  modified_base 37: mod_base = OTHER; note = 2'-O-Methyl-uridine
  modified_base 38: mod_base = OTHER; note = 2'-O-Methyl-adenosine
  modified_base 39: mod_base = OTHER; note = 2'-O-Methyl-guanosine
  modified_base 40: mod_base = OTHER; note = 2'-O-Methyl-cytidine
  modified_base 41: mod_base = OTHER; note = 2'-O-Methyl-adenosine
  modified_base 42: mod_base = OTHER; note = 2'-O-Methyl-adenosine
  modified_base 46: mod_base = OTHER; note = 2'-O-Methyl-adenosine
  modified_base 48: mod_base = OTHER; note = 2'-O-Methyl-adenosine
  modified_base 50: mod_base = OTHER; note = 2'-O-Methyl-uridine
  modified_base 52: mod_base = OTHER; note = 2'-O-Methyl-adenosine
  modified_base 53: mod_base = OTHER; note = 2'-O-Methyl-guanosine
  modified_base 54: mod_base = OTHER; note = 2'-O-Methyl-guanosine
  modified_base 55: mod_base = OTHER; note = 2'-O-Methyl-cytidine
  modified_base 56: mod_base = OTHER; note = 2'-O-Methyl-uridine
  modified_base 57: mod_base = OTHER; note = 2'-O-Methyl-adenosine
  modified_base 60: mod_base = OTHER; note = 2'-O-Methyl-cytidine
  modified_base 61: mod_base = OTHER; note = 2'-O-Methyl-cytidine
  modified_base 66: mod_base = OTHER; note = 2'-O-Methyl-uridine
  modified_base 67: mod_base = OTHER; note = 2'-O-Methyl-cytidine
  modified_base 70: mod_base = OTHER; note = 2'-O-Methyl-cytidine
  modified_base 71: mod_base = OTHER; note = 2'-O-Methyl-uridine
  modified_base 72: mod_base = OTHER; note = 2'-O-Methyl-uridine
  modified_base 74: mod_base = OTHER; note = 2'-O-Methyl-adenosine
  modified_base 75: mod_base = OTHER; note = 2'-O-Methyl-adenosine
  modified_base 76: mod_base = OTHER; note = 2'-O-Methyl-adenosine
  modified_base 77: mod_base = OTHER; note = 2'-O-Methyl-adenosine
  modified_base 78: mod_base = OTHER; note = 2'-O-Methyl-adenosine
  modified_base 79: mod_base = OTHER; note = 2'-O-Methyl-guanosine
  modified_base 80: mod_base = OTHER; note = 2'-O-Methyl-uridine
  modified_base 82: mod_base = OTHER; note = 2'-O-Methyl-guanosine
  modified_base 83: mod_base = OTHER; note = 2'-O-Methyl-cytidine
  modified_base 84: mod_base = OTHER; note = 2'-O-Methyl-adenosine
  modified_base 85: mod_base = OTHER; note = 2'-O-Methyl-cytidine
  modified_base 86: mod_base = OTHER; note = 2'-O-Methyl-cytidine
  modified_base 87: mod_base = OTHER; note = 2'-O-Methyl-guanosine
  modified_base 89: mod_base = OTHER; note = 2'-O-Methyl-guanosine
  modified_base 92: mod_base = OTHER; note = 2'-O-Methyl-guanosine
  modified_base 93: mod_base = OTHER; note = 2'-O-Methyl-guanosine
  modified_base 94: mod_base = OTHER; note = 2'-O-Methyl-uridine
  modified_base 95: mod_base = OTHER; note = 2'-O-Methyl-guanosine
  modified_base 96: mod_base = OTHER; note = 2'-O-Methyl-cytidine
  modified_base 97: mod_base = OTHER; note = 2'-O-Methyl-uridine phosphorothioate
  modified_base 98: mod_base = OTHER; note = 2'-O-Methyl-uridine phosphorothioate
  modified_base 99: mod_base = OTHER; note = 2'-O-Methyl-uridine phosphorothioate
  modified_base 100: mod_base = OTHER; note = 2'-O-Methyl-uridine
  misc_difference 101: note = a, c, g, inosine, u, deoxyadenosine, deoxyguanosine, deoxycytidine, deoxyinosine, thymine, ribonebularine, 2'-O-methylnebularine, or 2'-deoxynebularine
  misc_difference 102: note = a, c, g, inosine, u, deoxyadenosine, deoxyguanosine, deoxycytidine, deoxyinosine, thymine, ribonebularine, 2'-O-methylnebularine, or 2'-deoxynebularine
  misc_difference 103: note = a, c, g, inosine, u, deoxyadenosine, deoxyguanosine, deoxycytidine, deoxyinosine, thymine, ribonebularine, 2'-O-methylnebularine, or 2'-deoxynebularine

SEQ ID NO: 2765 - RNA, 103 nt, synthetic construct; identical to SEQ ID NO: 1797
  source 1..103: mol_type = other RNA
  modified_base 1: mod_base = OTHER; note = 2'-O-Methyl-cytidine phosphorothioate
  modified_base 2: mod_base = OTHER; note = 2'-O-Methyl-adenosine phosphorothioate
  modified_base 3: mod_base = OTHER; note = 2'-O-Methyl-guanosine phosphorothioate
  modified_base 21: mod_base = OTHER; note = 2'-O-Methyl-guanosine
  modified_base 28: mod_base = OTHER; note = 2'-O-Methyl-adenosine
  modified_base 29: mod_base = OTHER; note = 2'-O-Methyl-guanosine
  modified_base 30: mod_base = OTHER; note = 2'-O-Methyl-cytidine
  modified_base 31: mod_base = OTHER; note = 2'-O-Methyl-uridine
  modified_base 32: mod_base = OTHER; note = 2'-O-Methyl-adenosine
  modified_base 33: mod_base = OTHER; note = 2'-O-Methyl-guanosine
  modified_base 34: mod_base = OTHER; note = 2'-O-Methyl-adenosine
  modified_base 35: mod_base = OTHER; note = 2'-O-Methyl-adenosine
  modified_base 36: mod_base = OTHER; note = 2'-O-Methyl-adenosine
  modified_base 37: mod_base = OTHER; note = 2'-O-Methyl-uridine
  modified_base 38: mod_base = OTHER; note = 2'-O-Methyl-adenosine
  modified_base 39: mod_base = OTHER; note = 2'-O-Methyl-guanosine
  modified_base 40: mod_base = OTHER; note = 2'-O-Methyl-cytidine
  modified_base 41: mod_base = OTHER; note = 2'-O-Methyl-adenosine
  modified_base 42: mod_base = OTHER; note = 2'-O-Methyl-adenosine
  modified_base 46: mod_base = OTHER; note = 2'-O-Methyl-adenosine
  modified_base 48: mod_base = OTHER; note = 2'-O-Methyl-adenosine
  modified_base 50: mod_base = OTHER; note = 2'-O-Methyl-uridine
  modified_base 52: mod_base = OTHER; note = 2'-O-Methyl-adenosine
  modified_base 53: mod_base = OTHER; note = 2'-O-Methyl-guanosine
  modified_base 54: mod_base = OTHER; note = 2'-O-Methyl-guanosine
  modified_base 57: mod_base = OTHER; note = 2'-O-Methyl-adenosine
  modified_base 61: mod_base = OTHER; note = 2'-O-Methyl-cytidine
  modified_base 66: mod_base = OTHER; note = 2'-O-Methyl-uridine
  modified_base 67: mod_base = OTHER; note = 2'-O-Methyl-cytidine
  modified_base 70: mod_base = OTHER; note = 2'-O-Methyl-cytidine
  modified_base 71: mod_base = OTHER; note = 2'-O-Methyl-uridine
  modified_base 72: mod_base = OTHER; note = 2'-O-Methyl-uridine
  modified_base 73: mod_base = OTHER; note = 2'-O-Methyl-guanosine
  modified_base 74: mod_base = OTHER; note = 2'-O-Methyl-adenosine
  modified_base 75: mod_base = OTHER; note = 2'-O-Methyl-adenosine
  modified_base 76: mod_base = OTHER; note = 2'-O-Methyl-adenosine
  modified_base 77: mod_base = OTHER; note = 2'-O-Methyl-adenosine
  modified_base 78: mod_base = OTHER; note = 2'-O-Methyl-adenosine
  modified_base 79: mod_base = OTHER; note = 2'-O-Methyl-guanosine
  modified_base 80: mod_base = OTHER; note = 2'-O-Methyl-uridine
  modified_base 82: mod_base = OTHER; note = 2'-O-Methyl-guanosine
  modified_base 83: mod_base = OTHER; note = 2'-O-Methyl-cytidine
  modified_base 84: mod_base = OTHER; note = 2'-O-Methyl-adenosine
  modified_base 85: mod_base = OTHER; note = 2'-O-Methyl-cytidine
  modified_base 86: mod_base = OTHER; note = 2'-O-Methyl-cytidine
  modified_base 87: mod_base = OTHER; note = 2'-O-Methyl-guanosine
  modified_base 89: mod_base = OTHER; note = 2'-O-Methyl-guanosine
  modified_base 92: mod_base = OTHER; note = 2'-O-Methyl-guanosine
  modified_base 93: mod_base = OTHER; note = 2'-O-Methyl-guanosine
  modified_base 94: mod_base = OTHER; note = 2'-O-Methyl-uridine
  modified_base 95: mod_base = OTHER; note = 2'-O-Methyl-guanosine
  modified_base 96: mod_base = OTHER; note = 2'-O-Methyl-cytidine
  modified_base 97: mod_base = OTHER; note = 2'-O-Methyl-uridine phosphorothioate
  modified_base 98: mod_base = OTHER; note = 2'-O-Methyl-uridine phosphorothioate
  modified_base 99: mod_base = OTHER; note = 2'-O-Methyl-uridine phosphorothioate
  modified_base 100: mod_base = OTHER; note = 2'-O-Methyl-uridine
  misc_difference 101: note = a, c, g, inosine, u, deoxyadenosine, deoxyguanosine, deoxycytidine, deoxyinosine, thymine, ribonebularine, 2'-O-methylnebularine, or 2'-deoxynebularine
  misc_difference 102: note = a, c, g, inosine, u, deoxyadenosine, deoxyguanosine, deoxycytidine, deoxyinosine, thymine, ribonebularine, 2'-O-methylnebularine, or 2'-deoxynebularine
  misc_difference 103: note = a, c, g, inosine, u, deoxyadenosine, deoxyguanosine, deoxycytidine, deoxyinosine, thymine, ribonebularine, 2'-O-methylnebularine, or 2'-deoxynebularine

SEQ ID NO: 2766 - RNA, 103 nt, synthetic construct; identical to SEQ ID NO: 1797
  source 1..103: mol_type = other RNA
  modified_base 1: mod_base = OTHER; note = 2'-O-Methyl-cytidine phosphorothioate
  modified_base 2: mod_base = OTHER; note = 2'-O-Methyl-adenosine phosphorothioate
  modified_base 3: mod_base = OTHER; note = 2'-O-Methyl-guanosine phosphorothioate
  modified_base 21: mod_base = OTHER; note = 2'-O-Methyl-guanosine
  modified_base 28: mod_base = OTHER; note = 2'-O-Methyl-adenosine
  modified_base 29: mod_base = OTHER; note = 2'-O-Methyl-guanosine
  modified_base 30: mod_base = OTHER; note = 2'-O-Methyl-cytidine
  modified_base 31: mod_base = OTHER; note = 2'-O-Methyl-uridine
  modified_base 32: mod_base = OTHER; note = 2'-O-Methyl-adenosine
  modified_base 33: mod_base = OTHER; note = 2'-O-Methyl-guanosine
  modified_base 34: mod_base = OTHER; note = 2'-O-Methyl-adenosine
  modified_base 35: mod_base = OTHER; note = 2'-O-Methyl-adenosine
  modified_base 36: mod_base = OTHER; note = 2'-O-Methyl-adenosine
  modified_base 37: mod_base = OTHER; note = 2'-O-Methyl-uridine
  modified_base 38: mod_base = OTHER; note = 2'-O-Methyl-adenosine
  modified_base 39: mod_base = OTHER; note = 2'-O-Methyl-guanosine
  modified_base 40: mod_base = OTHER; note = 2'-O-Methyl-cytidine
  modified_base 41: mod_base = OTHER; note = 2'-O-Methyl-adenosine
  modified_base 42: mod_base = OTHER; note = 2'-O-Methyl-adenosine
  modified_base 46: mod_base = OTHER; note = 2'-O-Methyl-adenosine
  modified_base 48: mod_base = OTHER; note = 2'-O-Methyl-adenosine
  modified_base 50: mod_base = OTHER; note = 2'-O-Methyl-uridine
  modified_base 52: mod_base = OTHER; note = 2'-O-Methyl-adenosine
  modified_base 53: mod_base = OTHER; note = 2'-O-Methyl-guanosine
  modified_base 54: mod_base = OTHER; note = 2'-O-Methyl-guanosine
  modified_base 57: mod_base = OTHER; note = 2'-O-Methyl-adenosine
  modified_base 61: mod_base = OTHER; note = 2'-O-Methyl-cytidine
  modified_base 66: mod_base = OTHER; note = 2'-O-Methyl-uridine
  modified_base 67: mod_base = OTHER; note = 2'-O-Methyl-cytidine
  modified_base 70: mod_base = OTHER; note = 2'-O-Methyl-cytidine
  modified_base 71: mod_base = OTHER; note = 2'-O-Methyl-uridine
  modified_base 72: mod_base = OTHER; note = 2'-O-Methyl-uridine
  modified_base 73: mod_base = OTHER; note = 2'-O-Methyl-guanosine
  modified_base 74: mod_base = OTHER; note = 2'-O-Methyl-adenosine
  modified_base 75: mod_base = OTHER; note = 2'-O-Methyl-adenosine
  modified_base 76: mod_base = OTHER; note = 2'-O-Methyl-adenosine
  modified_base 77: mod_base = OTHER; note = 2'-O-Methyl-adenosine
  modified_base 78: mod_base = OTHER; note = 2'-O-Methyl-adenosine
  modified_base 79: mod_base = OTHER; note = 2'-O-Methyl-guanosine
  modified_base 80: mod_base = OTHER; note = 2'-O-Methyl-uridine
  modified_base 82: mod_base = OTHER; note = 2'-O-Methyl-guanosine
  modified_base 83: mod_base = OTHER; note = 2'-O-Methyl-cytidine
  modified_base 84: mod_base = OTHER; note = 2'-O-Methyl-adenosine
  modified_base 85: mod_base = OTHER; note = 2'-O-Methyl-cytidine
  modified_base 86: mod_base = OTHER; note = 2'-O-Methyl-cytidine
  modified_base 87: mod_base = OTHER; note = 2'-O-Methyl-guanosine
  modified_base 89: mod_base = OTHER; note = 2'-O-Methyl-guanosine
  modified_base 91: mod_base = OTHER; note = 2'-O-Methyl-cytidine
  modified_base 92: mod_base = OTHER; note = 2'-O-Methyl-guanosine
  modified_base 93: mod_base = OTHER; note = 2'-O-Methyl-guanosine
  modified_base 94: mod_base = OTHER; note = 2'-O-Methyl-uridine
  modified_base 95: mod_base = OTHER; note = 2'-O-Methyl-guanosine
  modified_base 96: mod_base = OTHER; note = 2'-O-Methyl-cytidine
  modified_base 97: mod_base = OTHER; note = 2'-O-Methyl-uridine phosphorothioate
  modified_base 98: mod_base = OTHER; note = 2'-O-Methyl-uridine phosphorothioate
  modified_base 99: mod_base = OTHER; note = 2'-O-Methyl-uridine phosphorothioate
  modified_base 100: mod_base = OTHER; note = 2'-O-Methyl-uridine
  misc_difference 101: note = a, c, g, inosine, u, deoxyadenosine, deoxyguanosine, deoxycytidine, deoxyinosine, thymine, ribonebularine, 2'-O-methylnebularine, or 2'-deoxynebularine
  misc_difference 102: note = a, c, g, inosine, u, deoxyadenosine, deoxyguanosine, deoxycytidine, deoxyinosine, thymine, ribonebularine, 2'-O-methylnebularine, or 2'-deoxynebularine
  misc_difference 103: note = a, c, g, inosine, u, deoxyadenosine, deoxyguanosine, deoxycytidine, deoxyinosine, thymine, ribonebularine, 2'-O-methylnebularine, or 2'-deoxynebularine

SEQ ID NO: 2767 - RNA, 103 nt, synthetic construct; identical to SEQ ID NO: 1797
  source 1..103: mol_type = other RNA
  modified_base 1: mod_base = OTHER; note = 2'-O-Methyl-cytidine phosphorothioate
  modified_base 2: mod_base = OTHER; note = 2'-O-Methyl-adenosine phosphorothioate
  modified_base 3: mod_base = OTHER; note = 2'-O-Methyl-guanosine phosphorothioate
  modified_base 21: mod_base = OTHER; note = 2'-O-Methyl-guanosine
  modified_base 28: mod_base = OTHER; note = 2'-O-Methyl-adenosine
  modified_base 29: mod_base = OTHER; note = 2'-O-Methyl-guanosine
  modified_base 30: mod_base = OTHER; note = 2'-O-Methyl-cytidine
  modified_base 31: mod_base = OTHER; note = 2'-O-Methyl-uridine
  modified_base 32: mod_base = OTHER; note = 2'-O-Methyl-adenosine
  modified_base 34: mod_base = OTHER; note = 2'-O-Methyl-adenosine
  modified_base 35: mod_base = OTHER; note = 2'-O-Methyl-adenosine
  modified_base 36: mod_base = OTHER; note = 2'-O-Methyl-adenosine
  modified_base 37: mod_base = OTHER; note = 2'-O-Methyl-uridine
  modified_base 38: mod_base = OTHER; note = 2'-O-Methyl-adenosine
  modified_base 39: mod_base = OTHER; note = 2'-O-Methyl-guanosine
  modified_base 40: mod_base = OTHER; note = 2'-O-Methyl-cytidine
  modified_base 41: mod_base = OTHER; note = 2'-O-Methyl-adenosine
  modified_base 42: mod_base = OTHER; note = 2'-O-Methyl-adenosine
  modified_base 46: mod_base = OTHER; note = 2'-O-Methyl-adenosine
  modified_base 48: mod_base = OTHER; note = 2'-O-Methyl-adenosine
  modified_base 50: mod_base = OTHER; note = 2'-O-Methyl-uridine
  modified_base 52: mod_base = OTHER; note = 2'-O-Methyl-adenosine
  modified_base 53: mod_base = OTHER; note = 2'-O-Methyl-guanosine
  modified_base 54: mod_base = OTHER; note = 2'-O-Methyl-guanosine
  modified_base 57: mod_base = OTHER; note = 2'-O-Methyl-adenosine
  modified_base 61: mod_base = OTHER; note = 2'-O-Methyl-cytidine
  modified_base 66: mod_base = OTHER; note = 2'-O-Methyl-uridine
  modified_base 67: mod_base = OTHER; note = 2'-O-Methyl-cytidine
  modified_base 70: mod_base = OTHER; note = 2'-O-Methyl-cytidine
  modified_base 71: mod_base = OTHER; note = 2'-O-Methyl-uridine
  modified_base 72: mod_base = OTHER; note = 2'-O-Methyl-uridine
  modified_base 73: mod_base = OTHER; note = 2'-O-Methyl-guanosine
  modified_base 74: mod_base = OTHER; note = 2'-O-Methyl-adenosine
  modified_base 75: mod_base = OTHER; note = 2'-O-Methyl-adenosine
  modified_base 76: mod_base = OTHER; note = 2'-O-Methyl-adenosine
  modified_base 77: mod_base = OTHER; note = 2'-O-Methyl-adenosine
  modified_base 78: mod_base = OTHER; note = 2'-O-Methyl-adenosine
  modified_base 79: mod_base = OTHER; note = 2'-O-Methyl-guanosine
  modified_base 80: mod_base = OTHER; note = 2'-O-Methyl-uridine
  modified_base 82: mod_base = OTHER; note = 2'-O-Methyl-guanosine
  modified_base 83: mod_base = OTHER; note = 2'-O-Methyl-cytidine
  modified_base 84: mod_base = OTHER; note = 2'-O-Methyl-adenosine
  modified_base 85: mod_base = OTHER; note = 2'-O-Methyl-cytidine
  modified_base 86: mod_base = OTHER; note = 2'-O-Methyl-cytidine
  modified_base 87: mod_base = OTHER; note = 2'-O-Methyl-guanosine
  modified_base 89: mod_base = OTHER; note = 2'-O-Methyl-guanosine
  modified_base 92: mod_base = OTHER; note = 2'-O-Methyl-guanosine
  modified_base 93: mod_base = OTHER; note = 2'-O-Methyl-guanosine
  modified_base 94: mod_base = OTHER; note = 2'-O-Methyl-uridine
  modified_base 95: mod_base = OTHER; note = 2'-O-Methyl-guanosine
  modified_base 96: mod_base = OTHER; note = 2'-O-Methyl-cytidine
  modified_base 97: mod_base = OTHER; note = 2'-O-Methyl-uridine phosphorothioate
  modified_base 98: mod_base = OTHER; note = 2'-O-Methyl-uridine phosphorothioate
  modified_base 99: mod_base = OTHER; note = 2'-O-Methyl-uridine phosphorothioate
  modified_base 100: mod_base = OTHER; note = 2'-O-Methyl-uridine
  misc_difference 101: note = a, c, g, inosine, u, deoxyadenosine, deoxyguanosine, deoxycytidine, deoxyinosine, thymine, ribonebularine, 2'-O-methylnebularine, or 2'-deoxynebularine
  misc_difference 102: note = a, c, g, inosine, u, deoxyadenosine, deoxyguanosine, deoxycytidine, deoxyinosine, thymine, ribonebularine, 2'-O-methylnebularine, or 2'-deoxynebularine
  misc_difference 103: note = a, c, g, inosine, u, deoxyadenosine, deoxyguanosine, deoxycytidine, deoxyinosine, thymine, ribonebularine, 2'-O-methylnebularine, or 2'-deoxynebularine

SEQ ID NO: 2768 - RNA, 103 nt, synthetic construct; identical to SEQ ID NO: 1797
  source 1..103: mol_type = other RNA
  modified_base 1: mod_base = OTHER; note = 2'-O-Methyl-cytidine phosphorothioate
  modified_base 2: mod_base = OTHER; note = 2'-O-Methyl-adenosine phosphorothioate
  modified_base 3: mod_base = OTHER; note = 2'-O-Methyl-guanosine phosphorothioate
  modified_base 21: mod_base = OTHER; note = 2'-O-Methyl-guanosine
  modified_base 28: mod_base = OTHER; note = 2'-O-Methyl-adenosine
  modified_base 29: mod_base = OTHER; note = 2'-O-Methyl-guanosine
  modified_base 30: mod_base = OTHER; note = 2'-O-Methyl-cytidine
  modified_base 31: mod_base = OTHER; note = 2'-O-Methyl-uridine
  modified_base 32: mod_base = OTHER; note = 2'-O-Methyl-adenosine
  modified_base 34: mod_base = OTHER; note = 2'-O-Methyl-adenosine
  modified_base 35: mod_base = OTHER; note = 2'-O-Methyl-adenosine
  modified_base 36: mod_base = OTHER; note = 2'-O-Methyl-adenosine
  modified_base 37: mod_base = OTHER; note = 2'-O-Methyl-uridine
  modified_base 38: mod_base = OTHER; note = 2'-O-Methyl-adenosine
  modified_base 39: mod_base = OTHER; note = 2'-O-Methyl-guanosine
  modified_base 40: mod_base = OTHER; note = 2'-O-Methyl-cytidine
  modified_base 41: mod_base = OTHER; note = 2'-O-Methyl-adenosine
  modified_base 42: mod_base = OTHER; note = 2'-O-Methyl-adenosine
  modified_base 46: mod_base = OTHER; note = 2'-O-Methyl-adenosine
  modified_base 48: mod_base = OTHER; note = 2'-O-Methyl-adenosine
  modified_base 50: mod_base = OTHER; note = 2'-O-Methyl-uridine
  modified_base 52: mod_base = OTHER; note = 2'-O-Methyl-adenosine
  modified_base 53: mod_base = OTHER; note = 2'-O-Methyl-guanosine
  modified_base 54: mod_base = OTHER; note = 2'-O-Methyl-guanosine
  modified_base 57: mod_base = OTHER; note = 2'-O-Methyl-adenosine
  modified_base 61: mod_base = OTHER; note = 2'-O-Methyl-cytidine
  modified_base 66: mod_base = OTHER; note = 2'-O-Methyl-uridine
  modified_base 67: mod_base = OTHER; note = 2'-O-Methyl-cytidine
  modified_base 70: mod_base = OTHER; note = 2'-O-Methyl-cytidine
  modified_base 71: mod_base = OTHER; note = 2'-O-Methyl-uridine
  modified_base 72: mod_base = OTHER; note = 2'-O-Methyl-uridine
  modified_base 73: mod_base = OTHER; note = 2'-O-Methyl-guanosine
  modified_base 74: mod_base = OTHER; note = 2'-O-Methyl-adenosine
  modified_base 75: mod_base = OTHER; note = 2'-O-Methyl-adenosine
  modified_base 76: mod_base = OTHER; note = 2'-O-Methyl-adenosine
  modified_base 77: mod_base = OTHER; note = 2'-O-Methyl-adenosine
  modified_base 78: mod_base = OTHER; note = 2'-O-Methyl-adenosine
  modified_base 79: mod_base = OTHER; note = 2'-O-Methyl-guanosine
  modified_base 80: mod_base = OTHER; note = 2'-O-Methyl-uridine
  modified_base 82: mod_base = OTHER; note = 2'-O-Methyl-guanosine
  modified_base 83: mod_base = OTHER; note = 2'-O-Methyl-cytidine
  modified_base 84: mod_base = OTHER; note = 2'-O-Methyl-adenosine
  modified_base 85: mod_base = OTHER; note = 2'-O-Methyl-cytidine
  modified_base 86: mod_base = OTHER; note = 2'-O-Methyl-cytidine
  modified_base 87: mod_base = OTHER; note = 2'-O-Methyl-guanosine
  modified_base 89: mod_base = OTHER; note = 2'-O-Methyl-guanosine
  modified_base 91: mod_base = OTHER; note = 2'-O-Methyl-cytidine
  modified_base 92: mod_base = OTHER; note = 2'-O-Methyl-guanosine
  modified_base 93: mod_base = OTHER; note = 2'-O-Methyl-guanosine
  modified_base 94: mod_base = OTHER; note = 2'-O-Methyl-uridine
  modified_base 95: mod_base = OTHER; note = 2'-O-Methyl-guanosine
  modified_base 96: mod_base = OTHER; note = 2'-O-Methyl-cytidine
  modified_base 97: mod_base = OTHER; note = 2'-O-Methyl-uridine phosphorothioate
  modified_base 98: mod_base = OTHER; note = 2'-O-Methyl-uridine phosphorothioate
  modified_base 99: mod_base = OTHER; note = 2'-O-Methyl-uridine phosphorothioate
  modified_base 100: mod_base = OTHER; note = 2'-O-Methyl-uridine
  misc_difference 101: note = a, c, g, inosine, u, deoxyadenosine, deoxyguanosine, deoxycytidine, deoxyinosine, thymine, ribonebularine, 2'-O-methylnebularine, or 2'-deoxynebularine
  misc_difference 102: note = a, c, g, inosine, u, deoxyadenosine, deoxyguanosine, deoxycytidine, deoxyinosine, thymine, ribonebularine, 2'-O-methylnebularine, or 2'-deoxynebularine
  misc_difference 103: note = a, c, g, inosine, u, deoxyadenosine, deoxyguanosine, deoxycytidine, deoxyinosine, thymine, ribonebularine, 2'-O-methylnebularine, or 2'-deoxynebularine

SEQ ID NO: 2769 - RNA, 103 nt, synthetic construct; identical to SEQ ID NO: 1797
  source 1..103: mol_type = other RNA
  modified_base 1: mod_base = OTHER; note = 2'-O-Methyl-cytidine phosphorothioate
  modified_base 2: mod_base = OTHER; note = 2'-O-Methyl-adenosine phosphorothioate
  modified_base 3: mod_base = OTHER; note = 2'-O-Methyl-guanosine phosphorothioate
  modified_base 21: mod_base = OTHER; note = 2'-O-Methyl-guanosine
  modified_base 28: mod_base = OTHER; note = 2'-O-Methyl-adenosine
  modified_base 29: mod_base = OTHER; note = 2'-O-Methyl-guanosine
  modified_base 30: mod_base = OTHER; note = 2'-O-Methyl-cytidine
  modified_base 31: mod_base = OTHER; note = 2'-O-Methyl-uridine
  modified_base 32: mod_base = OTHER; note = 2'-O-Methyl-adenosine
  modified_base 34: mod_base = OTHER; note = 2'-O-Methyl-adenosine
  modified_base 35: mod_base = OTHER; note = 2'-O-Methyl-adenosine
  modified_base 36: mod_base = OTHER; note = 2'-O-Methyl-adenosine
  modified_base 37: mod_base = OTHER; note = 2'-O-Methyl-uridine
  modified_base 38: mod_base = OTHER; note = 2'-O-Methyl-adenosine
  modified_base 39: mod_base = OTHER; note = 2'-O-Methyl-guanosine
  modified_base 40: mod_base = OTHER; note = 2'-O-Methyl-cytidine
  modified_base 41: mod_base = OTHER; note = 2'-O-Methyl-adenosine
  modified_base 42: mod_base = OTHER; note = 2'-O-Methyl-adenosine
  modified_base 46: mod_base = OTHER; note = 2'-O-Methyl-adenosine
  modified_base 48: mod_base = OTHER; note = 2'-O-Methyl-adenosine
  modified_base 50: mod_base = OTHER; note = 2'-O-Methyl-uridine
  modified_base 52: mod_base = OTHER; note = 2'-O-Methyl-adenosine
  modified_base 53: mod_base = OTHER; note = 2'-O-Methyl-guanosine
  modified_base 54: mod_base = OTHER; note = 2'-O-Methyl-guanosine
  modified_base 55: mod_base = OTHER; note = 2'-O-Methyl-cytidine
  modified_base 56: mod_base = OTHER; note = 2'-O-Methyl-uridine
  modified_base 57: mod_base = OTHER; note = 2'-O-Methyl-adenosine
  modified_base 60: mod_base = OTHER; note = 2'-O-Methyl-cytidine
  modified_base 61: mod_base = OTHER; note = 2'-O-Methyl-cytidine
  modified_base 66: mod_base = OTHER; note = 2'-O-Methyl-uridine
  modified_base 67: mod_base = OTHER; note = 2'-O-Methyl-cytidine
  modified_base 70: mod_base = OTHER; note = 2'-O-Methyl-cytidine
  modified_base 71: mod_base = OTHER; note = 2'-O-Methyl-uridine
  modified_base 72: mod_base = OTHER; note = 2'-O-Methyl-uridine
  modified_base 74: mod_base = OTHER; note = 2'-O-Methyl-adenosine
  modified_base 75: mod_base = OTHER; note = 2'-O-Methyl-adenosine
  modified_base 76: mod_base = OTHER; note = 2'-O-Methyl-adenosine
  modified_base 77: mod_base = OTHER; note = 2'-O-Methyl-adenosine
  modified_base 78: mod_base = OTHER; note = 2'-O-Methyl-adenosine
  modified_base 79: mod_base = OTHER; note = 2'-O-Methyl-guanosine
  modified_base 80: mod_base = OTHER; note = 2'-O-Methyl-uridine
  modified_base 82: mod_base = OTHER; note = 2'-O-Methyl-guanosine
  modified_base 83: mod_base = OTHER; note = 2'-O-Methyl-cytidine
  modified_base 84: mod_base = OTHER; note = 2'-O-Methyl-adenosine
  modified_base 85: mod_base = OTHER; note = 2'-O-Methyl-cytidine
  modified_base 86: mod_base = OTHER; note = 2'-O-Methyl-cytidine
  modified_base 87: mod_base = OTHER; note = 2'-O-Methyl-guanosine
  modified_base 89: mod_base = OTHER; note = 2'-O-Methyl-guanosine
  modified_base 92: mod_base = OTHER; note = 2'-O-Methyl-guanosine
  modified_base 93: mod_base = OTHER; note = 2'-O-Methyl-guanosine
  modified_base 94: mod_base = OTHER; note = 2'-O-Methyl-uridine
  modified_base 95: mod_base = OTHER; note = 2'-O-Methyl-guanosine
  modified_base 96: mod_base = OTHER; note = 2'-O-Methyl-cytidine
  modified_base 97: mod_base = OTHER; note = 2'-O-Methyl-uridine phosphorothioate
  modified_base 98: mod_base = OTHER; note = 2'-O-Methyl-uridine phosphorothioate
  modified_base 99: mod_base = OTHER; note = 2'-O-Methyl-uridine phosphorothioate
  modified_base 100: mod_base = OTHER; note = 2'-O-Methyl-uridine
  misc_difference 101: note = a, c, g, inosine, u, deoxyadenosine, deoxyguanosine, deoxycytidine, deoxyinosine, thymine, ribonebularine, 2'-O-methylnebularine, or 2'-deoxynebularine
  misc_difference 102: note = a, c, g, inosine, u, deoxyadenosine, deoxyguanosine, deoxycytidine, deoxyinosine, thymine, ribonebularine, 2'-O-methylnebularine, or 2'-deoxynebularine
  misc_difference 103: note = a, c, g, inosine, u, deoxyadenosine, deoxyguanosine, deoxycytidine, deoxyinosine, thymine, ribonebularine, 2'-O-methylnebularine, or 2'-deoxynebularine

SEQ ID NO: 2770 - RNA, 103 nt, synthetic construct; identical to SEQ ID NO: 1795
  source 1..103: mol_type = other RNA
  modified_base 1: mod_base = OTHER; note = 2'-O-Methyl-cytidine phosphorothioate
  modified_base 2: mod_base = OTHER; note = 2'-O-Methyl-cytidine phosphorothioate
  modified_base 3: mod_base = OTHER; note = 2'-O-Methyl-cytidine phosphorothioate
  modified_base 21: mod_base = OTHER; note = 2'-O-Methyl-guanosine
  modified_base 28: mod_base = OTHER; note = 2'-O-Methyl-adenosine
  modified_base 29: mod_base = OTHER; note = 2'-O-Methyl-guanosine
  modified_base 30: mod_base = OTHER; note = 2'-O-Methyl-cytidine
  modified_base 31: mod_base = OTHER; note = 2'-O-Methyl-uridine
  modified_base 32: mod_base = OTHER; note = 2'-O-Methyl-adenosine
  modified_base 33: mod_base = OTHER; note = 2'-O-Methyl-guanosine
  modified_base 34: mod_base = OTHER; note = 2'-O-Methyl-adenosine
  modified_base 35: mod_base = OTHER; note = 2'-O-Methyl-adenosine
  modified_base 36: mod_base = OTHER; note = 2'-O-Methyl-adenosine
  modified_base 37: mod_base = OTHER; note = 2'-O-Methyl-uridine
  modified_base 38: mod_base = OTHER; note = 2'-O-Methyl-adenosine
  modified_base 39: mod_base = OTHER; note = 2'-O-Methyl-guanosine
  modified_base 40: mod_base = OTHER; note = 2'-O-Methyl-cytidine
  modified_base 41: mod_base = OTHER; note = 2'-O-Methyl-adenosine
  modified_base 42: mod_base = OTHER; note = 2'-O-Methyl-adenosine
  modified_base 46: mod_base = OTHER; note = 2'-O-Methyl-adenosine
  modified_base 48: mod_base = OTHER; note = 2'-O-Methyl-adenosine
  modified_base 50: mod_base = OTHER; note = 2'-O-Methyl-uridine
  modified_base 52: mod_base = OTHER; note = 2'-O-Methyl-adenosine
  modified_base 53: mod_base = OTHER; note = 2'-O-Methyl-guanosine
  modified_base 54: mod_base = OTHER; note = 2'-O-Methyl-guanosine
  modified_base 55: mod_base = OTHER; note = 2'-O-Methyl-cytidine
  modified_base 56: mod_base = OTHER; note = 2'-O-Methyl-uridine
  modified_base 57: mod_base = OTHER; note = 2'-O-Methyl-adenosine
  modified_base 60: mod_base = OTHER; note = 2'-O-Methyl-cytidine
  modified_base 61: mod_base = OTHER; note = 2'-O-Methyl-cytidine
  modified_base 64: mod_base = OTHER; note = uridine phosphorothioate
  modified_base 66: mod_base = OTHER; note = 2'-O-Methyl-uridine
  modified_base 67: mod_base = OTHER; note = 2'-O-Methyl-cytidine
  modified_base 70: mod_base = OTHER; note = 2'-O-Methyl-cytidine
  modified_base 71: mod_base = OTHER; note = 2'-O-Methyl-uridine
  modified_base 72: mod_base = OTHER; note = 2'-O-Methyl-uridine
  modified_base 73: mod_base = OTHER; note = 2'-O-Methyl-guanosine
  modified_base 74: mod_base = OTHER; note = 2'-O-Methyl-adenosine
  modified_base 75: mod_base = OTHER; note = 2'-O-Methyl-adenosine
  modified_base 76: mod_base = OTHER; note = 2'-O-Methyl-adenosine
  modified_base 77: mod_base = OTHER; note = 2'-O-Methyl-adenosine
  modified_base 78: mod_base = OTHER; note = 2'-O-Methyl-adenosine
  modified_base 79: mod_base = OTHER; note = 2'-O-Methyl-guanosine
  modified_base 80: mod_base = OTHER; note = 2'-O-Methyl-uridine
  modified_base 81: mod_base = OTHER; note = 2'-O-Methyl-guanosine
  modified_base 83: mod_base = OTHER; note = 2'-O-Methyl-cytidine
  modified_base 84: mod_base = OTHER; note = 2'-O-Methyl-adenosine
  modified_base 85: mod_base = OTHER; note = 2'-O-Methyl-cytidine
  modified_base 86: mod_base = OTHER; note = 2'-O-Methyl-cytidine
  modified_base 87: mod_base = OTHER; note = 2'-O-Methyl-guanosine
  modified_base 88: mod_base = OTHER; note = 2'-O-Methyl-adenosine
  modified_base 89: mod_base = OTHER; note = 2'-O-Methyl-guanosine
  modified_base 90: mod_base = OTHER; note = 2'-O-Methyl-uridine
  modified_base 91: mod_base = OTHER; note = 2'-O-Methyl-cytidine
  modified_base 92: mod_base = OTHER; note = 2'-O-Methyl-guanosine
  modified_base 93: mod_base = OTHER; note = 2'-O-Methyl-guanosine
  modified_base 94: mod_base = OTHER; note = 2'-O-Methyl-uridine
  modified_base 95: mod_base = OTHER; note = 2'-O-Methyl-guanosine
  modified_base 96: mod_base = OTHER; note = 2'-O-Methyl-cytidine
  modified_base 97: mod_base = OTHER; note = 2'-O-Methyl-uridine phosphorothioate
  modified_base 98: mod_base = OTHER; note = 2'-O-Methyl-uridine phosphorothioate
  modified_base 99: mod_base = OTHER; note = 2'-O-Methyl-uridine phosphorothioate
  modified_base 100: mod_base = OTHER; note = 2'-O-Methyl-uridine
  misc_difference 101: note = a, c, g, inosine, u, deoxyadenosine, deoxyguanosine, deoxycytidine, deoxyinosine, thymine, ribonebularine, 2'-O-methylnebularine, or 2'-deoxynebularine
  misc_difference 102: note = a, c, g, inosine, u, deoxyadenosine, deoxyguanosine, deoxycytidine, deoxyinosine, thymine, ribonebularine, 2'-O-methylnebularine, or 2'-deoxynebularine
  misc_difference 103: note = a, c, g, inosine, u, deoxyadenosine, deoxyguanosine, deoxycytidine, deoxyinosine, thymine, ribonebularine, 2'-O-methylnebularine, or 2'-deoxynebularine

SEQ ID NO: 2771 - RNA, 103 nt, synthetic construct; identical to SEQ ID NO: 1795
  source 1..103: mol_type = other RNA
  modified_base 1: mod_base = OTHER; note = 2'-O-Methyl-cytidine phosphorothioate
  modified_base 2: mod_base = OTHER; note = 2'-O-Methyl-cytidine phosphorothioate
  modified_base 3: mod_base = OTHER; note = 2'-O-Methyl-cytidine phosphorothioate
  modified_base 21: mod_base = OTHER; note = 2'-O-Methyl-guanosine
  modified_base 28: mod_base = OTHER; note = 2'-O-Methyl-adenosine
  modified_base 29: mod_base = OTHER; note = 2'-O-Methyl-guanosine
  modified_base 30: mod_base = OTHER; note = 2'-O-Methyl-cytidine
  modified_base 31: mod_base = OTHER; note = 2'-O-Methyl-uridine
  modified_base 32: mod_base = OTHER; note = 2'-O-Methyl-adenosine
  modified_base 34: mod_base = OTHER; note = 2'-O-Methyl-adenosine
  modified_base 35: mod_base = OTHER; note = 2'-O-Methyl-adenosine
  modified_base 36: mod_base = OTHER; note = 2'-O-Methyl-adenosine
  modified_base 37: mod_base = OTHER; note = 2'-O-Methyl-uridine
  modified_base 38: mod_base = OTHER; note = 2'-O-Methyl-adenosine
  modified_base 39: mod_base = OTHER; note = 2'-O-Methyl-guanosine
  modified_base 40: mod_base = OTHER; note = 2'-O-Methyl-cytidine
  modified_base 41: mod_base = OTHER; note = 2'-O-Methyl-adenosine
  modified_base 42: mod_base = OTHER; note = 2'-O-Methyl-adenosine
  modified_base 46: mod_base = OTHER; note = 2'-O-Methyl-adenosine
  modified_base 48: mod_base = OTHER; note = 2'-O-Methyl-adenosine
  modified_base 50: mod_base = OTHER; note = 2'-O-Methyl-uridine
  modified_base 52: mod_base = OTHER; note = 2'-O-Methyl-adenosine
  modified_base 53: mod_base = OTHER; note = 2'-O-Methyl-guanosine
  modified_base 54: mod_base = OTHER; note = 2'-O-Methyl-guanosine
  modified_base 55: mod_base = OTHER; note = 2'-O-Methyl-cytidine
  modified_base 56: mod_base = OTHER; note = 2'-O-Methyl-uridine
  modified_base 57: mod_base = OTHER; note = 2'-O-Methyl-adenosine
  modified_base 60: mod_base = OTHER; note = 2'-O-Methyl-cytidine
  modified_base 61: mod_base = OTHER; note = 2'-O-Methyl-cytidine
  modified_base 64: mod_base = OTHER; note = uridine phosphorothioate
  modified_base 66: mod_base = OTHER; note = 2'-O-Methyl-uridine
  modified_base 67: mod_base = OTHER; note = 2'-O-Methyl-cytidine
  modified_base 70: mod_base = OTHER; note = 2'-O-Methyl-cytidine
  modified_base 71: mod_base = OTHER; note = 2'-O-Methyl-uridine
  modified_base 72: mod_base = OTHER; note = 2'-O-Methyl-uridine
  modified_base 74: mod_base = OTHER; note = 2'-O-Methyl-adenosine
  modified_base 75: mod_base = OTHER; note = 2'-O-Methyl-adenosine
  modified_base 76: mod_base = OTHER; note = 2'-O-Methyl-adenosine
  modified_base 77: mod_base = OTHER; note = 2'-O-Methyl-adenosine
  modified_base 78: mod_base = OTHER; note = 2'-O-Methyl-adenosine
  modified_base 79: mod_base = OTHER; note = 2'-O-Methyl-guanosine
  modified_base 80: mod_base = OTHER; note = 2'-O-Methyl-uridine
  modified_base 81: mod_base = OTHER; note = 2'-O-Methyl-guanosine
  modified_base 83: mod_base = OTHER; note = 2'-O-Methyl-cytidine
  modified_base 84: mod_base = OTHER; note = 2'-O-Methyl-adenosine
  modified_base 85: mod_base = OTHER; note = 2'-O-Methyl-cytidine
  modified_base 86: mod_base = OTHER; note = 2'-O-Methyl-cytidine
  modified_base 87: mod_base = OTHER; note = 2'-O-Methyl-guanosine
  modified_base 88: mod_base = OTHER; note = 2'-O-Methyl-adenosine
  modified_base 89: mod_base = OTHER; note = 2'-O-Methyl-guanosine
  modified_base 90: mod_base = OTHER; note = 2'-O-Methyl-uridine
  modified_base 91: mod_base = OTHER; note = 2'-O-Methyl-cytidine
  modified_base 92: mod_base = OTHER; note = 2'-O-Methyl-guanosine
  modified_base 93: mod_base = OTHER; note = 2'-O-Methyl-guanosine
  modified_base 94: mod_base = OTHER; note = 2'-O-Methyl-uridine
  modified_base 95: mod_base = OTHER; note = 2'-O-Methyl-guanosine
  modified_base 96: mod_base = OTHER; note = 2'-O-Methyl-cytidine
  modified_base 97: mod_base = OTHER; note = 2'-O-Methyl-uridine phosphorothioate
  modified_base 98: mod_base = OTHER; note = 2'-O-Methyl-uridine phosphorothioate
  modified_base 99: mod_base = OTHER; note = 2'-O-Methyl-uridine phosphorothioate
  modified_base 100: mod_base = OTHER; note = 2'-O-Methyl-uridine
  misc_difference 101: note = a, c, g, inosine, u, deoxyadenosine, deoxyguanosine, deoxycytidine, deoxyinosine, thymine, ribonebularine, 2'-O-methylnebularine, or 2'-deoxynebularine
  misc_difference 102: note = a, c, g, inosine, u, deoxyadenosine, deoxyguanosine, deoxycytidine, deoxyinosine, thymine, ribonebularine, 2'-O-methylnebularine, or 2'-deoxynebularine
  misc_difference 103: note = a, c, g, inosine, u, deoxyadenosine, deoxyguanosine, deoxycytidine, deoxyinosine, thymine, ribonebularine, 2'-O-methylnebularine, or 2'-deoxynebularine

SEQ ID NO: 2772 - RNA, 103 nt, synthetic construct; identical to SEQ ID NO: 1796
  source 1..103: mol_type = other RNA
  modified_base 1: mod_base = OTHER; note = 2'-O-Methyl-guanosine phosphorothioate
  modified_base 2: mod_base = OTHER; note = 2'-O-Methyl-adenosine phosphorothioate
  modified_base 3: mod_base = OTHER; note = 2'-O-Methyl-guanosine phosphorothioate
  modified_base 21: mod_base = OTHER; note = 2'-O-Methyl-guanosine
  modified_base 28: mod_base = OTHER; note = 2'-O-Methyl-adenosine
  modified_base 29: mod_base = OTHER; note = 2'-O-Methyl-guanosine
  modified_base 30: mod_base = OTHER; note = 2'-O-Methyl-cytidine
  modified_base 31: mod_base = OTHER; note = 2'-O-Methyl-uridine
  modified_base 32: mod_base = OTHER; note = 2'-O-Methyl-adenosine
  modified_base 33: mod_base = OTHER; note = 2'-O-Methyl-guanosine
  modified_base 34: mod_base = OTHER; note = 2'-O-Methyl-adenosine
  modified_base 35: mod_base = OTHER; note = 2'-O-Methyl-adenosine
  modified_base 36: mod_base = OTHER; note = 2'-O-Methyl-adenosine
  modified_base 37: mod_base = OTHER; note = 2'-O-Methyl-uridine
  modified_base 38: mod_base = OTHER; note = 2'-O-Methyl-adenosine
  modified_base 39: mod_base = OTHER; note = 2'-O-Methyl-guanosine
  modified_base 40: mod_base = OTHER; note = 2'-O-Methyl-cytidine
  modified_base 41: mod_base = OTHER; note = 2'-O-Methyl-adenosine
  modified_base 42: mod_base = OTHER; note = 2'-O-Methyl-adenosine
  modified_base 46: mod_base = OTHER; note = 2'-O-Methyl-adenosine
  modified_base 48: mod_base = OTHER; note = 2'-O-Methyl-adenosine
  modified_base 50: mod_base = OTHER; note = 2'-O-Methyl-uridine
  modified_base 52: mod_base = OTHER; note = 2'-O-Methyl-adenosine
  modified_base 53: mod_base = OTHER; note = 2'-O-Methyl-guanosine
  modified_base 54: mod_base = OTHER; note = 2'-O-Methyl-guanosine
  modified_base 55: mod_base = OTHER; note = 2'-O-Methyl-cytidine
  modified_base 56: mod_base = OTHER; note = 2'-O-Methyl-uridine
  modified_base 57: mod_base = OTHER; note = 2'-O-Methyl-adenosine
  modified_base 60: mod_base = OTHER; note = 2'-O-Methyl-cytidine
  modified_base 61: mod_base = OTHER; note = 2'-O-Methyl-cytidine
  modified_base 64: mod_base = OTHER; note = uridine phosphorothioate
  modified_base 66: mod_base = OTHER; note = 2'-O-Methyl-uridine
  modified_base 67: mod_base = OTHER; note = 2'-O-Methyl-cytidine
  modified_base 70: mod_base = OTHER; note = 2'-O-Methyl-cytidine
  modified_base 71: mod_base = OTHER; note = 2'-O-Methyl-uridine
  modified_base 72: mod_base = OTHER; note = 2'-O-Methyl-uridine
  modified_base 73: mod_base = OTHER; note = 2'-O-Methyl-guanosine
  modified_base 74: mod_base = OTHER; note = 2'-O-Methyl-adenosine
  modified_base 75: mod_base = OTHER; note = 2'-O-Methyl-adenosine
  modified_base 76: mod_base = OTHER; note = 2'-O-Methyl-adenosine
  modified_base 77: mod_base = OTHER; note = 2'-O-Methyl-adenosine
  modified_base 78: mod_base = OTHER; note = 2'-O-Methyl-adenosine
  modified_base 79: mod_base = OTHER; note = 2'-O-Methyl-guanosine
  modified_base 80: mod_base = OTHER; note = 2'-O-Methyl-uridine
  modified_base 81: mod_base = OTHER; note = 2'-O-Methyl-guanosine
  modified_base 83: mod_base = OTHER; note = 2'-O-Methyl-cytidine
  modified_base 84: mod_base = OTHER; note = 2'-O-Methyl-adenosine
  modified_base 85: mod_base = OTHER; note = 2'-O-Methyl-cytidine
  modified_base 86: mod_base = OTHER; note = 2'-O-Methyl-cytidine
  modified_base 87: mod_base = OTHER; note = 2'-O-Methyl-guanosine
  modified_base 88: mod_base = OTHER; note = 2'-O-Methyl-adenosine
  modified_base 89: mod_base = OTHER; note = 2'-O-Methyl-guanosine
  modified_base 90: mod_base = OTHER; note = 2'-O-Methyl-uridine
  modified_base 91: mod_base = OTHER; note = 2'-O-Methyl-cytidine
  modified_base 92: mod_base = OTHER; note = 2'-O-Methyl-guanosine
  modified_base 93: mod_base = OTHER; note = 2'-O-Methyl-guanosine
  modified_base 94: mod_base = OTHER; note = 2'-O-Methyl-uridine
  modified_base 95: mod_base = OTHER; note = 2'-O-Methyl-guanosine
  modified_base 96: mod_base = OTHER; note = 2'-O-Methyl-cytidine
  modified_base 97: mod_base = OTHER; note = 2'-O-Methyl-uridine phosphorothioate
  modified_base 98: mod_base = OTHER; note = 2'-O-Methyl-uridine phosphorothioate
  modified_base 99: mod_base = OTHER; note = 2'-O-Methyl-uridine phosphorothioate
  modified_base 100: mod_base = OTHER; note = 2'-O-Methyl-uridine
  misc_difference 101: note = a, c, g, inosine, u, deoxyadenosine, deoxyguanosine, deoxycytidine, deoxyinosine, thymine, ribonebularine, 2'-O-methylnebularine, or 2'-deoxynebularine
  misc_difference 102: note = a, c, g, inosine, u, deoxyadenosine, deoxyguanosine, deoxycytidine, deoxyinosine, thymine, ribonebularine, 2'-O-methylnebularine, or 2'-deoxynebularine
  misc_difference 103: note = a, c, g, inosine, u, deoxyadenosine, deoxyguanosine, deoxycytidine, deoxyinosine, thymine, ribonebularine, 2'-O-methylnebularine, or 2'-deoxynebularine

SEQ ID NO: 2773 - RNA, 103 nt, synthetic construct; identical to SEQ ID NO: 1796
  source 1..103: mol_type = other RNA
  modified_base 1: mod_base = OTHER; note = 2'-O-Methyl-guanosine phosphorothioate
  modified_base 2: mod_base = OTHER; note = 2'-O-Methyl-adenosine phosphorothioate
  modified_base 3: mod_base = OTHER; note = 2'-O-Methyl-guanosine phosphorothioate
  modified_base 21: mod_base = OTHER; note = 2'-O-Methyl-guanosine
  modified_base 28: mod_base = OTHER; note = 2'-O-Methyl-adenosine
  modified_base 29: mod_base = OTHER; note = 2'-O-Methyl-guanosine
  modified_base 30: mod_base = OTHER; note = 2'-O-Methyl-cytidine
  modified_base 31: mod_base = OTHER; note = 2'-O-Methyl-uridine
  modified_base 32: mod_base = OTHER; note = 2'-O-Methyl-adenosine
  modified_base 34: mod_base = OTHER; note = 2'-O-Methyl-adenosine
  modified_base 35: mod_base = OTHER; note = 2'-O-Methyl-adenosine
  modified_base 36: mod_base = OTHER; note = 2'-O-Methyl-adenosine
  modified_base 37: mod_base = OTHER; note = 2'-O-Methyl-uridine
  modified_base 38: mod_base = OTHER; note = 2'-O-Methyl-adenosine
  modified_base 39: mod_base = OTHER; note = 2'-O-Methyl-guanosine
  modified_base 40: mod_base = OTHER; note = 2'-O-Methyl-cytidine
  modified_base 41: mod_base = OTHER; note = 2'-O-Methyl-adenosine
  modified_base 42: mod_base = OTHER; note = 2'-O-Methyl-adenosine
  modified_base 46: mod_base = OTHER; note = 2'-O-Methyl-adenosine
  modified_base 48: mod_base = OTHER; note = 2'-O-Methyl-adenosine
  modified_base 50: mod_base = OTHER; note = 2'-O-Methyl-uridine
  modified_base 52: mod_base = OTHER; note = 2'-O-Methyl-adenosine
  modified_base 53: mod_base = OTHER; note = 2'-O-Methyl-guanosine
  modified_base 54: mod_base = OTHER; note = 2'-O-Methyl-guanosine
  modified_base 55: mod_base = OTHER; note = 2'-O-Methyl-cytidine
  modified_base 56: mod_base = OTHER; note = 2'-O-Methyl-uridine
  modified_base 57: mod_base = OTHER; note = 2'-O-Methyl-adenosine
  modified_base 60: mod_base = OTHER; note = 2'-O-Methyl-cytidine
  modified_base 61: mod_base = OTHER; note = 2'-O-Methyl-cytidine
  modified_base 64: mod_base = OTHER; note = uridine phosphorothioate
  modified_base 66: mod_base = OTHER; note = 2'-O-Methyl-uridine
  modified_base 67: mod_base = OTHER; note = 2'-O-Methyl-cytidine
  modified_base 70: mod_base = OTHER; note = 2'-O-Methyl-cytidine
  modified_base 71: mod_base = OTHER; note = 2'-O-Methyl-uridine
  modified_base 72: mod_base = OTHER; note = 2'-O-Methyl-uridine
  modified_base 74: mod_base = OTHER; note = 2'-O-Methyl-adenosine
  modified_base 75: mod_base = OTHER; note = 2'-O-Methyl-adenosine
  modified_base 76: mod_base = OTHER; note = 2'-O-Methyl-adenosine
  modified_base 77: mod_base = OTHER; note = 2'-O-Methyl-adenosine
  modified_base 78: mod_base = OTHER; note = 2'-O-Methyl-adenosine
  modified_base 79: mod_base = OTHER; note = 2'-O-Methyl-guanosine
  modified_base 80: mod_base = OTHER; note = 2'-O-Methyl-uridine
  modified_base 81: mod_base = OTHER; note = 2'-O-Methyl-guanosine
  modified_base 83: mod_base = OTHER; note = 2'-O-Methyl-cytidine
  modified_base 84: mod_base = OTHER; note = 2'-O-Methyl-adenosine
  modified_base 85: mod_base = OTHER; note = 2'-O-Methyl-cytidine
  modified_base 86: mod_base = OTHER; note = 2'-O-Methyl-cytidine
  modified_base 87: mod_base = OTHER; note = 2'-O-Methyl-guanosine
  modified_base 88: mod_base = OTHER; note = 2'-O-Methyl-adenosine
  modified_base 89: mod_base = OTHER; note = 2'-O-Methyl-guanosine
  modified_base 90: mod_base = OTHER; note = 2'-O-Methyl-uridine
  modified_base 91: mod_base = OTHER; note = 2'-O-Methyl-cytidine
  modified_base 92: mod_base = OTHER; note = 2'-O-Methyl-guanosine
  modified_base 93: mod_base = OTHER; note = 2'-O-Methyl-guanosine
  modified_base 94: mod_base = OTHER; note = 2'-O-Methyl-uridine
  modified_base 95: mod_base = OTHER; note = 2'-O-Methyl-guanosine
  modified_base 96: mod_base = OTHER; note = 2'-O-Methyl-cytidine
  modified_base 97: mod_base = OTHER; note = 2'-O-Methyl-uridine phosphorothioate
  modified_base 98: mod_base = OTHER; note = 2'-O-Methyl-uridine phosphorothioate
  modified_base 99: mod_base = OTHER; note = 2'-O-Methyl-uridine phosphorothioate
  modified_base 100: mod_base = OTHER; note = 2'-O-Methyl-uridine
  misc_difference 101: note = a, c, g, inosine, u, deoxyadenosine, deoxyguanosine, deoxycytidine, deoxyinosine, thymine, ribonebularine, 2'-O-methylnebularine, or 2'-deoxynebularine
  misc_difference 102: note = a, c, g, inosine, u, deoxyadenosine, deoxyguanosine, deoxycytidine, deoxyinosine, thymine, ribonebularine, 2'-O-methylnebularine, or 2'-deoxynebularine
  misc_difference 103: note = a, c, g, inosine, u, deoxyadenosine, deoxyguanosine, deoxycytidine, deoxyinosine, thymine, ribonebularine, 2'-O-methylnebularine, or 2'-deoxynebularine

SEQ ID NO: 2774 - RNA, 103 nt, synthetic construct; identical to SEQ ID NO: 1797
  source 1..103: mol_type = other RNA
  modified_base 1: mod_base = OTHER; note = 2'-O-Methyl-cytidine phosphorothioate
  modified_base 2: mod_base = OTHER; note = 2'-O-Methyl-adenosine phosphorothioate
  modified_base 3: mod_base = OTHER; note = 2'-O-Methyl-guanosine phosphorothioate
  modified_base 21: mod_base = OTHER; note = 2'-O-Methyl-guanosine
  modified_base 28: mod_base = OTHER; note = 2'-O-Methyl-adenosine
  modified_base 29: mod_base = OTHER; note = 2'-O-Methyl-guanosine
  modified_base 30: mod_base = OTHER; note = 2'-O-Methyl-cytidine
  modified_base 31: mod_base = OTHER; note = 2'-O-Methyl-uridine
  modified_base 32: mod_base = OTHER; note = 2'-O-Methyl-adenosine
  modified_base 33: mod_base = OTHER; note = 2'-O-Methyl-guanosine
  modified_base 34: mod_base = OTHER; note = 2'-O-Methyl-adenosine
  modified_base 35: mod_base = OTHER; note = 2'-O-Methyl-adenosine
  modified_base 36: mod_base = OTHER; note = 2'-O-Methyl-adenosine
  modified_base 37: mod_base = OTHER; note = 2'-O-Methyl-uridine
  modified_base 38: mod_base = OTHER; note = 2'-O-Methyl-adenosine
  modified_base 39: mod_base = OTHER; note = 2'-O-Methyl-guanosine
  modified_base 40: mod_base = OTHER; note = 2'-O-Methyl-cytidine
  modified_base 41: mod_base = OTHER; note = 2'-O-Methyl-adenosine
  modified_base 42: mod_base = OTHER; note = 2'-O-Methyl-adenosine
  modified_base 46: mod_base = OTHER; note = 2'-O-Methyl-adenosine
  modified_base 48: mod_base = OTHER; note = 2'-O-Methyl-adenosine
  modified_base 50: mod_base = OTHER; note = 2'-O-Methyl-uridine
  modified_base 52: mod_base = OTHER; note = 2'-O-Methyl-adenosine
  modified_base 53: mod_base = OTHER; note = 2'-O-Methyl-guanosine
  modified_base 54: mod_base = OTHER; note = 2'-O-Methyl-guanosine
  modified_base 57: mod_base = OTHER; note = 2'-O-Methyl-adenosine
  modified_base 61: mod_base = OTHER; note = 2'-O-Methyl-cytidine
  modified_base 64: mod_base = OTHER; note = uridine phosphorothioate
  modified_base 66: mod_base = OTHER; note = 2'-O-Methyl-uridine
  modified_base 67: mod_base = OTHER; note = 2'-O-Methyl-cytidine
  modified_base 70: mod_base = OTHER; note = 2'-O-Methyl-cytidine
  modified_base 71: mod_base = OTHER; note = 2'-O-Methyl-uridine
  modified_base 72: mod_base = OTHER; note = 2'-O-Methyl-uridine
  modified_base 74: mod_base = OTHER; note = 2'-O-Methyl-adenosine
  modified_base 75: mod_base = OTHER; note = 2'-O-Methyl-adenosine
  modified_base 76: mod_base = OTHER; note = 2'-O-Methyl-adenosine
  modified_base 77: mod_base = OTHER; note = 2'-O-Methyl-adenosine
  modified_base 78: mod_base = OTHER; note = 2'-O-Methyl-adenosine
  modified_base 79: mod_base = OTHER; note = 2'-O-Methyl-guanosine
  modified_base 80: mod_base = OTHER; note = 2'-O-Methyl-uridine
  modified_base 82: mod_base = OTHER; note = 2'-O-Methyl-guanosine
  modified_base 83: mod_base = OTHER; note = 2'-O-Methyl-cytidine
  modified_base 84: mod_base = OTHER; note = 2'-O-Methyl-adenosine
  modified_base 85: mod_base = OTHER; note = 2'-O-Methyl-cytidine
  modified_base 86: mod_base = OTHER; note = 2'-O-Methyl-cytidine
  modified_base 87: mod_base = OTHER; note = 2'-O-Methyl-guanosine
  modified_base 89: mod_base = OTHER; note = 2'-O-Methyl-guanosine
  modified_base 92: mod_base = OTHER; note = 2'-O-Methyl-guanosine
  modified_base 93: mod_base = OTHER; note = 2'-O-Methyl-guanosine
  modified_base 94: mod_base = OTHER; note = 2'-O-Methyl-uridine
  modified_base 95: mod_base = OTHER; note = 2'-O-Methyl-guanosine
  modified_base 96: mod_base = OTHER; note = 2'-O-Methyl-cytidine
  modified_base 97: mod_base = OTHER; note = 2'-O-Methyl-uridine phosphorothioate
  modified_base 98: mod_base = OTHER; note = 2'-O-Methyl-uridine phosphorothioate
  modified_base 99: mod_base = OTHER; note = 2'-O-Methyl-uridine phosphorothioate
  modified_base 100: mod_base = OTHER; note = 2'-O-Methyl-uridine
  misc_difference 101: note = a, c, g, inosine, u, deoxyadenosine, deoxyguanosine, deoxycytidine, deoxyinosine, thymine, ribonebularine, 2'-O-methylnebularine, or 2'-deoxynebularine
  misc_difference 102: note = a, c, g, inosine, u, deoxyadenosine, deoxyguanosine, deoxycytidine, deoxyinosine, thymine, ribonebularine, 2'-O-methylnebularine, or 2'-deoxynebularine
  misc_difference 103: note = a, c, g, inosine, u, deoxyadenosine, deoxyguanosine, deoxycytidine, deoxyinosine, thymine, ribonebularine, 2'-O-methylnebularine, or 2'-deoxynebularine

SEQ ID NO: 2775 - RNA, 103 nt, synthetic construct; identical to SEQ ID NO: 1797
  source 1..103: mol_type = other RNA
  modified_base 1: mod_base = OTHER; note = 2'-O-Methyl-cytidine phosphorothioate
  modified_base 2: mod_base = OTHER; note = 2'-O-Methyl-adenosine phosphorothioate
  modified_base 3: mod_base = OTHER; note = 2'-O-Methyl-guanosine phosphorothioate
  modified_base 21: mod_base = OTHER; note = 2'-O-Methyl-guanosine
  modified_base 28: mod_base = OTHER; note = 2'-O-Methyl-adenosine
  modified_base 29: mod_base = OTHER; note = 2'-O-Methyl-guanosine
  modified_base 30: mod_base = OTHER; note = 2'-O-Methyl-cytidine
  modified_base 31: mod_base = OTHER; note = 2'-O-Methyl-uridine
  modified_base 32: mod_base = OTHER; note = 2'-O-Methyl-adenosine
  modified_base 33: mod_base = OTHER; note = 2'-O-Methyl-guanosine
  modified_base 34: mod_base = OTHER; note = 2'-O-Methyl-adenosine
  modified_base 35: mod_base = OTHER; note = 2'-O-Methyl-adenosine
  modified_base 36: mod_base = OTHER; note = 2'-O-Methyl-adenosine
  modified_base 37: mod_base = OTHER; note = 2'-O-Methyl-uridine
  modified_base 38: mod_base = OTHER; note = 2'-O-Methyl-adenosine
  modified_base 39: mod_base = OTHER; note = 2'-O-Methyl-guanosine
  modified_base 40: mod_base = OTHER; note = 2'-O-Methyl-cytidine
  modified_base 41: mod_base = OTHER; note = 2'-O-Methyl-adenosine
  modified_base 42: mod_base = OTHER; note = 2'-O-Methyl-adenosine
  modified_base 46: mod_base = OTHER; note = 2'-O-Methyl-adenosine
  modified_base 48: mod_base = OTHER; note = 2'-O-Methyl-adenosine
  modified_base 50: mod_base = OTHER; note = 2'-O-Methyl-uridine
  modified_base 52: mod_base = OTHER; note = 2'-O-Methyl-adenosine
  modified_base 53: mod_base = OTHER; note = 2'-O-Methyl-guanosine
  modified_base 54: mod_base = OTHER; note = 2'-O-Methyl-guanosine
  modified_base 55: mod_base = OTHER; note = 2'-O-Methyl-cytidine
  modified_base 56: mod_base = OTHER; note = 2'-O-Methyl-uridine
  modified_base 57: mod_base = OTHER; note = 2'-O-Methyl-adenosine
  modified_base 60: mod_base = OTHER; note = 2'-O-Methyl-cytidine
  modified_base 61: mod_base = OTHER; note = 2'-O-Methyl-cytidine
  modified_base 64: mod_base = OTHER; note = uridine phosphorothioate
  modified_base 66: mod_base = OTHER; note = 2'-O-Methyl-uridine
  modified_base 67: mod_base = OTHER; note = 2'-O-Methyl-cytidine
  modified_base 70: mod_base = OTHER; note = 2'-O-Methyl-cytidine
  modified_base 71: mod_base = OTHER; note = 2'-O-Methyl-uridine
  modified_base 72: mod_base = OTHER; note = 2'-O-Methyl-uridine
  modified_base 74: mod_base = OTHER; note = 2'-O-Methyl-adenosine
  modified_base 75: mod_base = OTHER; note = 2'-O-Methyl-adenosine
  modified_base 76: mod_base = OTHER; note = 2'-O-Methyl-adenosine
  modified_base 77: mod_base = OTHER; note = 2'-O-Methyl-adenosine
  modified_base 78: mod_base = OTHER; note = 2'-O-Methyl-adenosine
  modified_base 79: mod_base = OTHER; note = 2'-O-Methyl-guanosine
  modified_base 80: mod_base = OTHER; note = 2'-O-Methyl-uridine
  modified_base 82: mod_base = OTHER; note = 2'-O-Methyl-guanosine
  modified_base 83: mod_base = OTHER; note = 2'-O-Methyl-cytidine
  modified_base 84: mod_base = OTHER; note = 2'-O-Methyl-adenosine
  modified_base 85: mod_base = OTHER; note = 2'-O-Methyl-cytidine
  modified_base 86: mod_base = OTHER; note = 2'-O-Methyl-cytidine
  modified_base 87: mod_base = OTHER; note = 2'-O-Methyl-guanosine
  modified_base 89: mod_base = OTHER; note = 2'-O-Methyl-guanosine
  modified_base 92: mod_base = OTHER; note = 2'-O-Methyl-guanosine
  modified_base 93: mod_base = OTHER; note = 2'-O-Methyl-guanosine
  modified_base 94: mod_base = OTHER; note = 2'-O-Methyl-uridine
  modified_base 95: mod_base = OTHER; note = 2'-O-Methyl-guanosine
  modified_base 96: mod_base = OTHER; note = 2'-O-Methyl-cytidine
  modified_base 97: mod_base = OTHER; note = 2'-O-Methyl-uridine phosphorothioate
  modified_base 98: mod_base = OTHER; note = 2'-O-Methyl-uridine phosphorothioate
  modified_base 99: mod_base = OTHER; note = 2'-O-Methyl-uridine phosphorothioate
  modified_base 100: mod_base = OTHER; note = 2'-O-Methyl-uridine
  misc_difference 101: note = a, c, g, inosine, u, deoxyadenosine, deoxyguanosine, deoxycytidine, deoxyinosine, thymine, ribonebularine, 2'-O-methylnebularine, or 2'-deoxynebularine
  misc_difference 102: note = a, c, g, inosine, u, deoxyadenosine, deoxyguanosine, deoxycytidine, deoxyinosine, thymine, ribonebularine, 2'-O-methylnebularine, or 2'-deoxynebularine
  misc_difference 103: note = a, c, g, inosine, u, deoxyadenosine, deoxyguanosine, deoxycytidine, deoxyinosine, thymine, ribonebularine, 2'-O-methylnebularine, or 2'-deoxynebularine

SEQ ID NO: 2776 - RNA, 103 nt, synthetic construct; identical to SEQ ID NO: 1797
  source 1..103: mol_type = other RNA
  modified_base 1: mod_base = OTHER; note = 2'-O-Methyl-cytidine phosphorothioate
  modified_base 2: mod_base = OTHER; note = 2'-O-Methyl-adenosine phosphorothioate
  modified_base 3: mod_base = OTHER; note = 2'-O-Methyl-guanosine phosphorothioate
  modified_base 21: mod_base = OTHER; note = 2'-O-Methyl-guanosine
  modified_base 28: mod_base = OTHER; note = 2'-O-Methyl-adenosine
  modified_base 29: mod_base = OTHER; note = 2'-O-Methyl-guanosine
  modified_base 30: mod_base = OTHER; note = 2'-O-Methyl-cytidine
  modified_base 31: mod_base = OTHER; note = 2'-O-Methyl-uridine
  modified_base 32: mod_base = OTHER; note = 2'-O-Methyl-adenosine
  modified_base 33: mod_base = OTHER; note = 2'-O-Methyl-guanosine
  modified_base 34: mod_base = OTHER; note = 2'-O-Methyl-adenosine
  modified_base 35: mod_base = OTHER; note = 2'-O-Methyl-adenosine
  modified_base 36: mod_base = OTHER; note = 2'-O-Methyl-adenosine
  modified_base 37: mod_base = OTHER; note = 2'-O-Methyl-uridine
  modified_base 38: mod_base = OTHER; note = 2'-O-Methyl-adenosine
  modified_base 39: mod_base = OTHER; note = 2'-O-Methyl-guanosine
  modified_base 40: mod_base = OTHER; note = 2'-O-Methyl-cytidine
  modified_base 41: mod_base = OTHER; note = 2'-O-Methyl-adenosine
  modified_base 42: mod_base = OTHER; note = 2'-O-Methyl-adenosine
  modified_base 46: mod_base = OTHER; note = 2'-O-Methyl-adenosine
  modified_base 48: mod_base = OTHER; note = 2'-O-Methyl-adenosine
  modified_base 50: mod_base = OTHER; note = 2'-O-Methyl-uridine
  modified_base 52: mod_base = OTHER; note = 2'-O-Methyl-adenosine
  modified_base 53: mod_base = OTHER; note = 2'-O-Methyl-guanosine
  modified_base 54: mod_base = OTHER; note = 2'-O-Methyl-guanosine
  modified_base 57: mod_base = OTHER; note = 2'-O-Methyl-adenosine
  modified_base 61: mod_base = OTHER; note = 2'-O-Methyl-cytidine
  modified_base 64: mod_base = OTHER; note = uridine phosphorothioate
  modified_base 66: mod_base = OTHER; note = 2'-O-Methyl-uridine
  modified_base 67: mod_base = OTHER; note = 2'-O-Methyl-cytidine
  modified_base 70: mod_base = OTHER; note = 2'-O-Methyl-cytidine
  modified_base 71: mod_base = OTHER; note = 2'-O-Methyl-uridine
  modified_base 72: mod_base = OTHER; note = 2'-O-Methyl-uridine
  modified_base 73: mod_base = OTHER; note = 2'-O-Methyl-guanosine
  modified_base 74: mod_base = OTHER; note = 2'-O-Methyl-adenosine
  modified_base 75: mod_base = OTHER; note = 2'-O-Methyl-adenosine
  modified_base 76: mod_base = OTHER; note = 2'-O-Methyl-adenosine
  modified_base 77: mod_base = OTHER; note = 2'-O-Methyl-adenosine
  modified_base 78: mod_base = OTHER; note = 2'-O-Methyl-adenosine
  modified_base 79: mod_base = OTHER; note = 2'-O-Methyl-guanosine
  modified_base 80: mod_base = OTHER; note = 2'-O-Methyl-uridine
  modified_base 82: mod_base = OTHER; note = 2'-O-Methyl-guanosine
  modified_base 83: mod_base = OTHER; note = 2'-O-Methyl-cytidine
  modified_base 84: mod_base = OTHER; note = 2'-O-Methyl-adenosine
  modified_base 85: mod_base = OTHER; note = 2'-O-Methyl-cytidine
  modified_base 86: mod_base = OTHER; note = 2'-O-Methyl-cytidine
  modified_base 87: mod_base = OTHER; note = 2'-O-Methyl-guanosine
  modified_base 89: mod_base = OTHER; note = 2'-O-Methyl-guanosine
  modified_base 92: mod_base = OTHER; note = 2'-O-Methyl-guanosine
  modified_base 93: mod_base = OTHER; note = 2'-O-Methyl-guanosine
  modified_base 94: mod_base = OTHER; note = 2'-O-Methyl-uridine
  modified_base 95: mod_base = OTHER; note = 2'-O-Methyl-guanosine
  modified_base 96: mod_base = OTHER; note = 2'-O-Methyl-cytidine
  modified_base 97: mod_base = OTHER; note = 2'-O-Methyl-uridine phosphorothioate
  modified_base 98: mod_base = OTHER; note = 2'-O-Methyl-uridine phosphorothioate
  modified_base 99: mod_base = OTHER; note = 2'-O-Methyl-uridine phosphorothioate
  modified_base 100: mod_base = OTHER; note = 2'-O-Methyl-uridine
  misc_difference 101: note = a, c, g, inosine, u, deoxyadenosine, deoxyguanosine, deoxycytidine, deoxyinosine, thymine, ribonebularine, 2'-O-methylnebularine, or 2'-deoxynebularine
  misc_difference 102: note = a, c, g, inosine, u, deoxyadenosine, deoxyguanosine, deoxycytidine, deoxyinosine, thymine, ribonebularine, 2'-O-methylnebularine, or 2'-deoxynebularine
  misc_difference 103: note = a, c, g, inosine, u, deoxyadenosine, deoxyguanosine, deoxycytidine, deoxyinosine, thymine, ribonebularine, 2'-O-methylnebularine, or 2'-deoxynebularine

SEQ ID NO: 2777 - RNA, 103 nt, synthetic construct; identical to SEQ ID NO: 1797
  source 1..103: mol_type = other RNA
  modified_base 1: mod_base = OTHER; note = 2'-O-Methyl-cytidine phosphorothioate
  modified_base 2: mod_base = OTHER; note = 2'-O-Methyl-adenosine phosphorothioate
  modified_base 3: mod_base = OTHER; note = 2'-O-Methyl-guanosine phosphorothioate
  modified_base 21: mod_base = OTHER; note = 2'-O-Methyl-guanosine
  modified_base 28: mod_base = OTHER; note = 2'-O-Methyl-adenosine
  modified_base 29: mod_base = OTHER; note = 2'-O-Methyl-guanosine
  modified_base 30: mod_base = OTHER; note = 2'-O-Methyl-cytidine
  modified_base 31: mod_base = OTHER; note = 2'-O-Methyl-uridine
  modified_base 32: mod_base = OTHER; note = 2'-O-Methyl-adenosine
  modified_base 33: mod_base = OTHER; note = 2'-O-Methyl-guanosine
  modified_base 34: mod_base = OTHER; note = 2'-O-Methyl-adenosine
  modified_base 35: mod_base = OTHER; note = 2'-O-Methyl-adenosine
  modified_base 36: mod_base = OTHER; note = 2'-O-Methyl-adenosine
  modified_base 37: mod_base = OTHER; note = 2'-O-Methyl-uridine
  modified_base 38: mod_base = OTHER; note = 2'-O-Methyl-adenosine
  modified_base 39: mod_base = OTHER; note = 2'-O-Methyl-guanosine
  modified_base 40: mod_base = OTHER; note = 2'-O-Methyl-cytidine
  modified_base 41: mod_base = OTHER; note = 2'-O-Methyl-adenosine
  modified_base 42: mod_base = OTHER; note = 2'-O-Methyl-adenosine
  modified_base 46: mod_base = OTHER; note = 2'-O-Methyl-adenosine
  modified_base 48: mod_base = OTHER; note = 2'-O-Methyl-adenosine
  modified_base 50: mod_base = OTHER; note = 2'-O-Methyl-uridine
  modified_base 52: mod_base = OTHER; note = 2'-O-Methyl-adenosine
  modified_base 53: mod_base = OTHER; note = 2'-O-Methyl-guanosine
  modified_base 54: mod_base = OTHER; note = 2'-O-Methyl-guanosine
  modified_base 57: mod_base = OTHER; note = 2'-O-Methyl-adenosine
  modified_base 61: mod_base = OTHER; note = 2'-O-Methyl-cytidine
  modified_base 64: mod_base = OTHER; note = uridine phosphorothioate
  modified_base 66: mod_base = OTHER; note = 2'-O-Methyl-uridine
  modified_base 67: mod_base = OTHER; note = 2'-O-Methyl-cytidine
  modified_base 70: mod_base = OTHER; note = 2'-O-Methyl-cytidine
  modified_base 71: mod_base = OTHER; note = 2'-O-Methyl-uridine
  modified_base 72: mod_base = OTHER; note = 2'-O-Methyl-uridine
  modified_base 73: mod_base = OTHER; note = 2'-O-Methyl-guanosine
  modified_base 74: mod_base = OTHER; note = 2'-O-Methyl-adenosine
  modified_base 75: mod_base = OTHER; note = 2'-O-Methyl-adenosine
  modified_base 76: mod_base = OTHER; note = 2'-O-Methyl-adenosine
  modified_base 77: mod_base = OTHER; note = 2'-O-Methyl-adenosine
  modified_base 78: mod_base = OTHER; note = 2'-O-Methyl-adenosine
  modified_base 79: mod_base = OTHER; note = 2'-O-Methyl-guanosine
  modified_base 80: mod_base = OTHER; note = 2'-O-Methyl-uridine
  modified_base 82: mod_base = OTHER; note = 2'-O-Methyl-guanosine
  modified_base 83: mod_base = OTHER; note = 2'-O-Methyl-cytidine
  modified_base 84: mod_base = OTHER; note = 2'-O-Methyl-adenosine
  modified_base 85: mod_base = OTHER; note = 2'-O-Methyl-cytidine
  modified_base 86: mod_base = OTHER; note = 2'-O-Methyl-cytidine
  modified_base 87: mod_base = OTHER; note = 2'-O-Methyl-guanosine
  modified_base 89: mod_base = OTHER; note = 2'-O-Methyl-guanosine
  modified_base 91: mod_base = OTHER; note = 2'-O-Methyl-cytidine
  modified_base 92: mod_base = OTHER; note = 2'-O-Methyl-guanosine
  modified_base 93: mod_base = OTHER; note = 2'-O-Methyl-guanosine
  modified_base 94: mod_base = OTHER; note = 2'-O-Methyl-uridine
  modified_base 95: mod_base = OTHER; note = 2'-O-Methyl-guanosine
  modified_base 96: mod_base = OTHER; note = 2'-O-Methyl-cytidine
  modified_base 97: mod_base = OTHER; note = 2'-O-Methyl-uridine phosphorothioate
  modified_base 98: mod_base = OTHER; note = 2'-O-Methyl-uridine phosphorothioate
  modified_base 99: mod_base = OTHER; note = 2'-O-Methyl-uridine phosphorothioate
  modified_base 100: mod_base = OTHER; note = 2'-O-Methyl-uridine
  misc_difference 101: note = a, c, g, inosine, u, deoxyadenosine, deoxyguanosine, deoxycytidine, deoxyinosine, thymine, ribonebularine, 2'-O-methylnebularine, or 2'-deoxynebularine
  misc_difference 102: note = a, c, g, inosine, u, deoxyadenosine, deoxyguanosine, deoxycytidine, deoxyinosine, thymine, ribonebularine, 2'-O-methylnebularine, or 2'-deoxynebularine
  misc_difference 103: note = a, c, g, inosine, u, deoxyadenosine, deoxyguanosine, deoxycytidine, deoxyinosine, thymine, ribonebularine, 2'-O-methylnebularine, or 2'-deoxynebularine

SEQ ID NO: 2778 - RNA, 103 nt, synthetic construct; identical to SEQ ID NO: 1797
  source 1..103: mol_type = other RNA
  modified_base 1: mod_base = OTHER; note = 2'-O-Methyl-cytidine phosphorothioate
  modified_base 2: mod_base = OTHER; note = 2'-O-Methyl-adenosine phosphorothioate
  modified_base 3: mod_base = OTHER; note = 2'-O-Methyl-guanosine phosphorothioate
  modified_base 21: mod_base = OTHER; note = 2'-O-Methyl-guanosine
  modified_base 28: mod_base = OTHER; note = 2'-O-Methyl-adenosine
  modified_base 29: mod_base = OTHER; note = 2'-O-Methyl-guanosine
  modified_base 30: mod_base = OTHER; note = 2'-O-Methyl-cytidine
  modified_base 31: mod_base = OTHER; note = 2'-O-Methyl-uridine
  modified_base 32: mod_base = OTHER; note = 2'-O-Methyl-adenosine
  modified_base 34: mod_base = OTHER; note = 2'-O-Methyl-adenosine
  modified_base 35: mod_base = OTHER; note = 2'-O-Methyl-adenosine
  modified_base 36: mod_base = OTHER; note = 2'-O-Methyl-adenosine
  modified_base 37: mod_base = OTHER; note = 2'-O-Methyl-uridine
  modified_base 38: mod_base = OTHER; note = 2'-O-Methyl-adenosine
  modified_base 39: mod_base = OTHER; note = 2'-O-Methyl-guanosine
  modified_base 40: mod_base = OTHER; note = 2'-O-Methyl-cytidine
  modified_base 41: mod_base = OTHER; note = 2'-O-Methyl-adenosine
  modified_base 42: mod_base = OTHER; note = 2'-O-Methyl-adenosine
  modified_base 46: mod_base = OTHER; note = 2'-O-Methyl-adenosine
  modified_base 48: mod_base = OTHER; note = 2'-O-Methyl-adenosine
  modified_base 50: mod_base = OTHER; note = 2'-O-Methyl-uridine
  modified_base 52: mod_base = OTHER; note = 2'-O-Methyl-adenosine
  modified_base 53: mod_base = OTHER; note = 2'-O-Methyl-guanosine
  modified_base 54: mod_base = OTHER; note = 2'-O-Methyl-guanosine
  modified_base 57: mod_base = OTHER; note = 2'-O-Methyl-adenosine
  modified_base 61: mod_base = OTHER; note = 2'-O-Methyl-cytidine
  modified_base 64: mod_base = OTHER; note = uridine phosphorothioate
  modified_base 66: mod_base = OTHER; note = 2'-O-Methyl-uridine
  modified_base 67: mod_base = OTHER; note = 2'-O-Methyl-cytidine
  modified_base 70: mod_base = OTHER; note = 2'-O-Methyl-cytidine
  modified_base 71: mod_base = OTHER; note = 2'-O-Methyl-uridine
  modified_base 72: mod_base = OTHER; note = 2'-O-Methyl-uridine
  modified_base 73: mod_base = OTHER; note = 2'-O-Methyl-guanosine
  modified_base 74: mod_base = OTHER; note = 2'-O-Methyl-adenosine
  modified_base 75: mod_base = OTHER; note = 2'-O-Methyl-adenosine
  modified_base 76: mod_base = OTHER; note = 2'-O-Methyl-adenosine
  modified_base 77: mod_base = OTHER; note = 2'-O-Methyl-adenosine
  modified_base 78: mod_base = OTHER; note = 2'-O-Methyl-adenosine
  modified_base 79: mod_base = OTHER; note = 2'-O-Methyl-guanosine
  modified_base 80: mod_base = OTHER; note = 2'-O-Methyl-uridine
  modified_base 82: mod_base = OTHER; note = 2'-O-Methyl-guanosine
  modified_base 83: mod_base = OTHER; note = 2'-O-Methyl-cytidine
  modified_base 84: mod_base = OTHER; note = 2'-O-Methyl-adenosine
  modified_base 85: mod_base = OTHER; note = 2'-O-Methyl-cytidine
  modified_base 86: mod_base = OTHER; note = 2'-O-Methyl-cytidine
  modified_base 87: mod_base = OTHER; note = 2'-O-Methyl-guanosine
  modified_base 89: mod_base = OTHER; note = 2'-O-Methyl-guanosine
  modified_base 92: mod_base = OTHER; note = 2'-O-Methyl-guanosine
  modified_base 93: mod_base = OTHER; note = 2'-O-Methyl-guanosine
  modified_base 94: mod_base = OTHER; note = 2'-O-Methyl-uridine
  modified_base 95: mod_base = OTHER; note = 2'-O-Methyl-guanosine
  modified_base 96: mod_base = OTHER; note = 2'-O-Methyl-cytidine
  modified_base 97: mod_base = OTHER; note = 2'-O-Methyl-uridine phosphorothioate
  modified_base 98: mod_base = OTHER; note = 2'-O-Methyl-uridine phosphorothioate
  modified_base 99: mod_base = OTHER; note = 2'-O-Methyl-uridine phosphorothioate
  modified_base 100: mod_base = OTHER; note = 2'-O-Methyl-uridine
  misc_difference 101: note = a, c, g, inosine, u, deoxyadenosine, deoxyguanosine, deoxycytidine, deoxyinosine, thymine, ribonebularine, 2'-O-methylnebularine, or 2'-deoxynebularine
  misc_difference 102: note = a, c, g, inosine, u, deoxyadenosine, deoxyguanosine, deoxycytidine, deoxyinosine, thymine, ribonebularine, 2'-O-methylnebularine, or 2'-deoxynebularine
  misc_difference 103: note = a, c, g, inosine, u, deoxyadenosine, deoxyguanosine, deoxycytidine, deoxyinosine, thymine, ribonebularine, 2'-O-methylnebularine, or 2'-deoxynebularine

SEQ ID NO: 2779 - RNA, 103 nt, synthetic construct; identical to SEQ ID NO: 1797
  source 1..103: mol_type = other RNA
  modified_base 1: mod_base = OTHER; note = 2'-O-Methyl-cytidine phosphorothioate
  modified_base 2: mod_base = OTHER; note = 2'-O-Methyl-adenosine phosphorothioate
  modified_base 3: mod_base = OTHER; note = 2'-O-Methyl-guanosine phosphorothioate
  modified_base 21: mod_base = OTHER; note = 2'-O-Methyl-guanosine
  modified_base 28: mod_base = OTHER; note = 2'-O-Methyl-adenosine
  modified_base 29: mod_base = OTHER; note = 2'-O-Methyl-guanosine
  modified_base 30: mod_base = OTHER; note = 2'-O-Methyl-cytidine
  modified_base 31: mod_base = OTHER; note = 2'-O-Methyl-uridine
  modified_base 32: mod_base = OTHER; note = 2'-O-Methyl-adenosine
  modified_base 34: mod_base = OTHER; note = 2'-O-Methyl-adenosine
  modified_base 35: mod_base = OTHER; note = 2'-O-Methyl-adenosine
  modified_base 36: mod_base = OTHER; note = 2'-O-Methyl-adenosine
  modified_base 37: mod_base = OTHER; note = 2'-O-Methyl-uridine
  modified_base 38: mod_base = OTHER; note = 2'-O-Methyl-adenosine
  modified_base 39: mod_base = OTHER; note = 2'-O-Methyl-guanosine
  modified_base 40: mod_base = OTHER; note = 2'-O-Methyl-cytidine
  modified_base 41: mod_base = OTHER; note = 2'-O-Methyl-adenosine
  modified_base 42: mod_base = OTHER; note = 2'-O-Methyl-adenosine
  modified_base 46: mod_base = OTHER; note = 2'-O-Methyl-adenosine
  modified_base 48: mod_base = OTHER; note = 2'-O-Methyl-adenosine
  modified_base 50: mod_base = OTHER; note = 2'-O-Methyl-uridine
  modified_base 52: mod_base = OTHER; note = 2'-O-Methyl-adenosine
  modified_base 53: mod_base = OTHER; note = 2'-O-Methyl-guanosine
  modified_base 54: mod_base = OTHER; note = 2'-O-Methyl-guanosine
  modified_base 57: mod_base = OTHER; note = 2'-O-Methyl-adenosine
  modified_base 61: mod_base = OTHER; note = 2'-O-Methyl-cytidine
  modified_base 64: mod_base = OTHER; note = uridine phosphorothioate
  modified_base 66: mod_base = OTHER; note = 2'-O-Methyl-uridine
  modified_base 67: mod_base = OTHER; note = 2'-O-Methyl-cytidine
  modified_base 70: mod_base = OTHER; note = 2'-O-Methyl-cytidine
  modified_base 71: mod_base = OTHER; note = 2'-O-Methyl-uridine
  modified_base 72: mod_base = OTHER; note = 2'-O-Methyl-uridine
  modified_base 73: mod_base = OTHER; note = 2'-O-Methyl-guanosine
  modified_base 74: mod_base = OTHER; note = 2'-O-Methyl-adenosine
  modified_base 75: mod_base = OTHER; note = 2'-O-Methyl-adenosine
  modified_base 76: mod_base = OTHER; note = 2'-O-Methyl-adenosine
  modified_base 77: mod_base = OTHER; note = 2'-O-Methyl-adenosine
  modified_base 78: mod_base = OTHER; note = 2'-O-Methyl-adenosine
  modified_base 79: mod_base = OTHER; note = 2'-O-Methyl-guanosine
  modified_base 80: mod_base = OTHER; note = 2'-O-Methyl-uridine
  modified_base 82: mod_base = OTHER; note = 2'-O-Methyl-guanosine
  modified_base 83: mod_base = OTHER; note = 2'-O-Methyl-cytidine
  modified_base 84: mod_base = OTHER; note = 2'-O-Methyl-adenosine
  modified_base 85: mod_base = OTHER; note = 2'-O-Methyl-cytidine
  modified_base 86: mod_base = OTHER; note = 2'-O-Methyl-cytidine
  modified_base 87: mod_base = OTHER; note = 2'-O-Methyl-guanosine
  modified_base 89: mod_base = OTHER; note = 2'-O-Methyl-guanosine
  modified_base 91: mod_base = OTHER; note = 2'-O-Methyl-cytidine
  modified_base 92: mod_base = OTHER; note = 2'-O-Methyl-guanosine
  modified_base 93: mod_base = OTHER; note = 2'-O-Methyl-guanosine
  modified_base 94: mod_base = OTHER; note = 2'-O-Methyl-uridine
  modified_base 95: mod_base = OTHER; note = 2'-O-Methyl-guanosine
  modified_base 96: mod_base = OTHER; note = 2'-O-Methyl-cytidine
  modified_base 97: mod_base = OTHER; note = 2'-O-Methyl-uridine phosphorothioate
  modified_base 98: mod_base = OTHER; note = 2'-O-Methyl-uridine phosphorothioate
  modified_base 99: mod_base = OTHER; note = 2'-O-Methyl-uridine phosphorothioate
  modified_base 100: mod_base = OTHER; note = 2'-O-Methyl-uridine
  misc_difference 101: note = a, c, g, inosine, u, deoxyadenosine, deoxyguanosine, deoxycytidine, deoxyinosine, thymine, ribonebularine, 2'-O-methylnebularine, or 2'-deoxynebularine
  misc_difference 102: note = a, c, g, inosine, u, deoxyadenosine, deoxyguanosine, deoxycytidine, deoxyinosine, thymine, ribonebularine, 2'-O-methylnebularine, or 2'-deoxynebularine
  misc_difference 103: note = a, c, g, inosine, u, deoxyadenosine, deoxyguanosine, deoxycytidine, deoxyinosine, thymine, ribonebularine, 2'-O-methylnebularine, or 2'-deoxynebularine

SEQ ID NO: 2780 - RNA, 103 nt, synthetic construct; identical to SEQ ID NO: 1797
  source 1..103: mol_type = other RNA
  modified_base 1: mod_base = OTHER; note = 2'-O-Methyl-cytidine phosphorothioate
  modified_base 2: mod_base = OTHER; note = 2'-O-Methyl-adenosine phosphorothioate
  modified_base 3: mod_base = OTHER; note = 2'-O-Methyl-guanosine phosphorothioate
  modified_base 21: mod_base = OTHER; note = 2'-O-Methyl-guanosine
  modified_base 28: mod_base = OTHER; note = 2'-O-Methyl-adenosine
  modified_base 29: mod_base = OTHER; note = 2'-O-Methyl-guanosine
  modified_base 30: mod_base = OTHER; note = 2'-O-Methyl-cytidine
  modified_base 31: mod_base = OTHER; note = 2'-O-Methyl-uridine
  modified_base 32: mod_base = OTHER; note = 2'-O-Methyl-adenosine
  modified_base 34: mod_base = OTHER; note = 2'-O-Methyl-adenosine
  modified_base 35: mod_base = OTHER; note = 2'-O-Methyl-adenosine
  modified_base 36: mod_base = OTHER; note = 2'-O-Methyl-adenosine
  modified_base 37: mod_base = OTHER; note = 2'-O-Methyl-uridine
  modified_base 38: mod_base = OTHER; note = 2'-O-Methyl-adenosine
  modified_base 39: mod_base = OTHER; note = 2'-O-Methyl-guanosine
  modified_base 40: mod_base = OTHER; note = 2'-O-Methyl-cytidine
  modified_base 41: mod_base = OTHER; note = 2'-O-Methyl-adenosine
  modified_base 42: mod_base = OTHER; note = 2'-O-Methyl-adenosine
  modified_base 46: mod_base = OTHER; note = 2'-O-Methyl-adenosine
  modified_base 48: mod_base = OTHER; note = 2'-O-Methyl-adenosine
  modified_base 50: mod_base = OTHER; note = 2'-O-Methyl-uridine
  modified_base 52: mod_base = OTHER; note = 2'-O-Methyl-adenosine
  modified_base 53: mod_base = OTHER; note = 2'-O-Methyl-guanosine
  modified_base 54: mod_base = OTHER; note = 2'-O-Methyl-guanosine
  modified_base 55: mod_base = OTHER; note = 2'-O-Methyl-cytidine
  modified_base 56: mod_base = OTHER; note = 2'-O-Methyl-uridine
  modified_base 57: mod_base = OTHER; note = 2'-O-Methyl-adenosine
  modified_base 60: mod_base = OTHER; note = 2'-O-Methyl-cytidine
  modified_base 61: mod_base = OTHER; note = 2'-O-Methyl-cytidine
  modified_base 64: mod_base = OTHER; note = uridine phosphorothioate
  modified_base 66: mod_base = OTHER; note = 2'-O-Methyl-uridine
  modified_base 67: mod_base = OTHER; note = 2'-O-Methyl-cytidine
  modified_base 70: mod_base = OTHER; note = 2'-O-Methyl-cytidine
  modified_base 71: mod_base = OTHER; note = 2'-O-Methyl-uridine
  modified_base 72: mod_base = OTHER; note = 2'-O-Methyl-uridine
  modified_base 74: mod_base = OTHER; note = 2'-O-Methyl-adenosine
  modified_base 75: mod_base = OTHER; note = 2'-O-Methyl-adenosine
  modified_base 76: mod_base = OTHER; note = 2'-O-Methyl-adenosine
  modified_base 77: mod_base = OTHER; note = 2'-O-Methyl-adenosine
  modified_base 78: mod_base = OTHER; note = 2'-O-Methyl-adenosine
  modified_base 79: mod_base = OTHER; note = 2'-O-Methyl-guanosine
  modified_base 80: mod_base = OTHER; note = 2'-O-Methyl-uridine
  modified_base 82: mod_base = OTHER; note = 2'-O-Methyl-guanosine
  modified_base 83: mod_base = OTHER; note = 2'-O-Methyl-cytidine
  modified_base 84: mod_base = OTHER; note = 2'-O-Methyl-adenosine
  modified_base 85: mod_base = OTHER; note = 2'-O-Methyl-cytidine
  modified_base 86: mod_base = OTHER; note = 2'-O-Methyl-cytidine
  modified_base 87: mod_base = OTHER; note = 2'-O-Methyl-guanosine
  modified_base 89: mod_base = OTHER; note = 2'-O-Methyl-guanosine
  modified_base 92: mod_base = OTHER; note = 2'-O-Methyl-guanosine
  modified_base 93: mod_base = OTHER; note = 2'-O-Methyl-guanosine
  modified_base 94: mod_base = OTHER; note = 2'-O-Methyl-uridine
  modified_base 95: mod_base = OTHER; note = 2'-O-Methyl-guanosine
  modified_base 96: mod_base = OTHER; note = 2'-O-Methyl-cytidine
  modified_base 97: mod_base = OTHER; note = 2'-O-Methyl-uridine phosphorothioate
  modified_base 98: mod_base = OTHER; note = 2'-O-Methyl-uridine phosphorothioate
  modified_base 99: mod_base = OTHER; note = 2'-O-Methyl-uridine phosphorothioate
  modified_base 100: mod_base = OTHER; note = 2'-O-Methyl-uridine
  misc_difference 101: note = a, c, g, inosine, u, deoxyadenosine, deoxyguanosine, deoxycytidine, deoxyinosine, thymine, ribonebularine, 2'-O-methylnebularine, or 2'-deoxynebularine
  misc_difference 102: note = a, c, g, inosine, u, deoxyadenosine, deoxyguanosine, deoxycytidine, deoxyinosine, thymine, ribonebularine, 2'-O-methylnebularine, or 2'-deoxynebularine
  misc_difference 103: note = a, c, g, inosine, u, deoxyadenosine, deoxyguanosine, deoxycytidine, deoxyinosine, thymine, ribonebularine, 2'-O-methylnebularine, or 2'-deoxynebularine

SEQ ID NO: 2781 - RNA, 103 nt, synthetic construct; identical to SEQ ID NO: 1795
  source 1..103: mol_type = other RNA
  modified_base 1: mod_base = OTHER; note = 2'-O-Methyl-cytidine phosphorothioate
  modified_base 2: mod_base = OTHER; note = 2'-O-Methyl-cytidine phosphorothioate
  modified_base 3: mod_base = OTHER; note = 2'-O-Methyl-cytidine phosphorothioate
  modified_base 21: mod_base = OTHER; note = 2'-O-Methyl-guanosine
  modified_base 28: mod_base = OTHER; note = 2'-O-Methyl-adenosine
  modified_base 29: mod_base = OTHER; note = 2'-O-Methyl-guanosine
  modified_base 30: mod_base = OTHER; note = 2'-O-Methyl-cytidine
  modified_base 31: mod_base = OTHER; note = 2'-O-Methyl-uridine
  modified_base 32: mod_base = OTHER; note = 2'-O-Methyl-adenosine
  modified_base 33: mod_base = OTHER; note = 2'-O-Methyl-guanosine
  modified_base 34: mod_base = OTHER; note = 2'-O-Methyl-adenosine
  modified_base 35: mod_base = OTHER; note = 2'-O-Methyl-adenosine
  modified_base 36: mod_base = OTHER; note = 2'-O-Methyl-adenosine
  modified_base 37: mod_base = OTHER; note = 2'-O-Methyl-uridine
  modified_base 38: mod_base = OTHER; note = 2'-O-Methyl-adenosine
  modified_base 39: mod_base = OTHER; note = 2'-O-Methyl-guanosine
  modified_base 40: mod_base = OTHER; note = 2'-O-Methyl-cytidine
  modified_base 41: mod_base = OTHER; note = 2'-O-Methyl-adenosine
  modified_base 42: mod_base = OTHER; note = 2'-O-Methyl-adenosine
  modified_base 45: mod_base = OTHER; note = uridine phosphorothioate
  modified_base 46: mod_base = OTHER; note = 2'-O-Methyl-adenosine
  modified_base 48: mod_base = OTHER; note = 2'-O-Methyl-adenosine
  modified_base 50: mod_base = OTHER; note = 2'-O-Methyl-uridine
  modified_base 52: mod_base = OTHER; note = 2'-O-Methyl-adenosine
  modified_base 53: mod_base = OTHER; note = 2'-O-Methyl-guanosine
  modified_base 54: mod_base = OTHER; note = 2'-O-Methyl-guanosine
  modified_base 55: mod_base = OTHER; note = 2'-O-Methyl-cytidine
  modified_base 56: mod_base = OTHER; note = 2'-O-Methyl-uridine
  modified_base 57: mod_base = OTHER; note = 2'-O-Methyl-adenosine
  modified_base 60: mod_base = OTHER; note = 2'-O-Methyl-cytidine
  modified_base 61: mod_base = OTHER; note = 2'-O-Methyl-cytidine
  modified_base 66: mod_base = OTHER; note = 2'-O-Methyl-uridine
  modified_base 67: mod_base = OTHER; note = 2'-O-Methyl-cytidine
  modified_base 70: mod_base = OTHER; note = 2'-O-Methyl-cytidine
  modified_base 71: mod_base = OTHER; note = 2'-O-Methyl-uridine
  modified_base 72: mod_base = OTHER; note = 2'-O-Methyl-uridine
  modified_base 73: mod_base = OTHER; note = 2'-O-Methyl-guanosine
  modified_base 74: mod_base = OTHER; note = 2'-O-Methyl-adenosine
  modified_base 75: mod_base = OTHER; note = 2'-O-Methyl-adenosine
  modified_base 76: mod_base = OTHER; note = 2'-O-Methyl-adenosine
  modified_base 77: mod_base = OTHER; note = 2'-O-Methyl-adenosine
  modified_base 78: mod_base = OTHER; note = 2'-O-Methyl-adenosine
  modified_base 79: mod_base = OTHER; note = 2'-O-Methyl-guanosine
  modified_base 80: mod_base = OTHER; note = 2'-O-Methyl-uridine
  modified_base 81: mod_base = OTHER; note = 2'-O-Methyl-guanosine
  modified_base 83: mod_base = OTHER; note = 2'-O-Methyl-cytidine
  modified_base 84: mod_base = OTHER; note = 2'-O-Methyl-adenosine
  modified_base 85: mod_base = OTHER; note = 2'-O-Methyl-cytidine
  modified_base 86: mod_base = OTHER; note = 2'-O-Methyl-cytidine
  modified_base 87: mod_base = OTHER; note = 2'-O-Methyl-guanosine
  modified_base 88: mod_base = OTHER; note = 2'-O-Methyl-adenosine
  modified_base 89: mod_base = OTHER; note = 2'-O-Methyl-guanosine
  modified_base 90: mod_base = OTHER; note = 2'-O-Methyl-uridine
  modified_base 91: mod_base = OTHER; note = 2'-O-Methyl-cytidine
  modified_base 92: mod_base = OTHER; note = 2'-O-Methyl-guanosine
  modified_base 93: mod_base = OTHER; note = 2'-O-Methyl-guanosine
  modified_base 94: mod_base = OTHER; note = 2'-O-Methyl-uridine
  modified_base 95: mod_base = OTHER; note = 2'-O-Methyl-guanosine
  modified_base 96: mod_base = OTHER; note = 2'-O-Methyl-cytidine
  modified_base 97: mod_base = OTHER; note = 2'-O-Methyl-uridine phosphorothioate
  modified_base 98: mod_base = OTHER; note = 2'-O-Methyl-uridine phosphorothioate
  modified_base 99: mod_base = OTHER; note = 2'-O-Methyl-uridine phosphorothioate
  modified_base 100: mod_base = OTHER; note = 2'-O-Methyl-uridine
  misc_difference 101: note = a, c, g, inosine, u, deoxyadenosine, deoxyguanosine, deoxycytidine, deoxyinosine, thymine, ribonebularine, 2'-O-methylnebularine, or 2'-deoxynebularine
  misc_difference 102: note = a, c, g, inosine, u, deoxyadenosine, deoxyguanosine, deoxycytidine, deoxyinosine, thymine, ribonebularine, 2'-O-methylnebularine, or 2'-deoxynebularine
  misc_difference 103: note = a, c, g, inosine, u, deoxyadenosine, deoxyguanosine, deoxycytidine, deoxyinosine, thymine, ribonebularine, 2'-O-methylnebularine, or 2'-deoxynebularine

SEQ ID NO: 2782 - RNA, 103 nt, synthetic construct; identical to SEQ ID NO: 1795
  source 1..103: mol_type = other RNA
  modified_base 1: mod_base = OTHER; note = 2'-O-Methyl-cytidine phosphorothioate
  modified_base 2: mod_base = OTHER; note = 2'-O-Methyl-cytidine phosphorothioate
  modified_base 3: mod_base = OTHER; note = 2'-O-Methyl-cytidine phosphorothioate
  modified_base 21: mod_base = OTHER; note = 2'-O-Methyl-guanosine
  modified_base 28: mod_base = OTHER; note = 2'-O-Methyl-adenosine
  modified_base 29: mod_base = OTHER; note = 2'-O-Methyl-guanosine
  modified_base 30: mod_base = OTHER; note = 2'-O-Methyl-cytidine
  modified_base 31: mod_base = OTHER; note = 2'-O-Methyl-uridine
  modified_base 32: mod_base = OTHER; note = 2'-O-Methyl-adenosine
  modified_base 34: mod_base = OTHER; note = 2'-O-Methyl-adenosine
  modified_base 35: mod_base = OTHER; note = 2'-O-Methyl-adenosine
  modified_base 36: mod_base = OTHER; note = 2'-O-Methyl-adenosine
  modified_base 37: mod_base = OTHER; note = 2'-O-Methyl-uridine
  modified_base 38: mod_base = OTHER; note = 2'-O-Methyl-adenosine
  modified_base 39: mod_base = OTHER; note = 2'-O-Methyl-guanosine
  modified_base 40: mod_base = OTHER; note = 2'-O-Methyl-cytidine
  modified_base 41: mod_base = OTHER; note = 2'-O-Methyl-adenosine
  modified_base 42: mod_base = OTHER; note = 2'-O-Methyl-adenosine
  modified_base 45: mod_base = OTHER; note = uridine phosphorothioate
  modified_base 46: mod_base = OTHER; note = 2'-O-Methyl-adenosine
  modified_base 48: mod_base = OTHER; note = 2'-O-Methyl-adenosine
  modified_base 50: mod_base = OTHER; note = 2'-O-Methyl-uridine
  modified_base 52: mod_base = OTHER; note = 2'-O-Methyl-adenosine
  modified_base 53: mod_base = OTHER; note = 2'-O-Methyl-guanosine
  modified_base 54: mod_base = OTHER; note = 2'-O-Methyl-guanosine
  modified_base 55: mod_base = OTHER; note = 2'-O-Methyl-cytidine
  modified_base 56: mod_base = OTHER; note = 2'-O-Methyl-uridine
  modified_base 57: mod_base = OTHER; note = 2'-O-Methyl-adenosine
  modified_base 60: mod_base = OTHER; note = 2'-O-Methyl-cytidine
  modified_base 61: mod_base = OTHER; note = 2'-O-Methyl-cytidine
  modified_base 66: mod_base = OTHER; note = 2'-O-Methyl-uridine
  modified_base 67: mod_base = OTHER; note = 2'-O-Methyl-cytidine
  modified_base 70: mod_base = OTHER; note = 2'-O-Methyl-cytidine
  modified_base 71: mod_base = OTHER; note = 2'-O-Methyl-uridine
  modified_base 72: mod_base = OTHER; note = 2'-O-Methyl-uridine
  modified_base 74: mod_base = OTHER; note = 2'-O-Methyl-adenosine
  modified_base 75: mod_base = OTHER; note = 2'-O-Methyl-adenosine
  modified_base 76: mod_base = OTHER; note = 2'-O-Methyl-adenosine
  modified_base 77: mod_base = OTHER; note = 2'-O-Methyl-adenosine
  modified_base 78: mod_base = OTHER; note = 2'-O-Methyl-adenosine
  modified_base 79: mod_base = OTHER; note = 2'-O-Methyl-guanosine
  modified_base 80: mod_base = OTHER; note = 2'-O-Methyl-uridine
  modified_base 81: mod_base = OTHER; note = 2'-O-Methyl-guanosine
  modified_base 83: mod_base = OTHER; note = 2'-O-Methyl-cytidine
  modified_base 84: mod_base = OTHER; note = 2'-O-Methyl-adenosine
  modified_base 85: mod_base = OTHER; note = 2'-O-Methyl-cytidine
  modified_base 86: mod_base = OTHER; note = 2'-O-Methyl-cytidine
  modified_base 87: mod_base = OTHER; note = 2'-O-Methyl-guanosine
  modified_base 88: mod_base = OTHER; note = 2'-O-Methyl-adenosine
  modified_base 89: mod_base = OTHER; note = 2'-O-Methyl-guanosine
  modified_base 90: mod_base = OTHER; note = 2'-O-Methyl-uridine
  modified_base 91: mod_base = OTHER; note = 2'-O-Methyl-cytidine
  modified_base 92: mod_base = OTHER; note = 2'-O-Methyl-guanosine
  modified_base 93: mod_base = OTHER; note = 2'-O-Methyl-guanosine
  modified_base 94: mod_base = OTHER; note = 2'-O-Methyl-uridine
  modified_base 95: mod_base = OTHER; note = 2'-O-Methyl-guanosine
  modified_base 96: mod_base = OTHER; note = 2'-O-Methyl-cytidine
  modified_base 97: mod_base = OTHER; note = 2'-O-Methyl-uridine phosphorothioate
  modified_base 98: mod_base = OTHER; note = 2'-O-Methyl-uridine phosphorothioate
  modified_base 99: mod_base = OTHER; note = 2'-O-Methyl-uridine phosphorothioate
  modified_base 100: mod_base = OTHER; note = 2'-O-Methyl-uridine
  misc_difference 101: note = a, c, g, inosine, u, deoxyadenosine, deoxyguanosine, deoxycytidine, deoxyinosine, thymine, ribonebularine, 2'-O-methylnebularine, or 2'-deoxynebularine
  misc_difference 102: note = a, c, g, inosine, u, deoxyadenosine, deoxyguanosine, deoxycytidine, deoxyinosine, thymine, ribonebularine, 2'-O-methylnebularine, or 2'-deoxynebularine
  misc_difference 103: note = a, c, g, inosine, u, deoxyadenosine, deoxyguanosine, deoxycytidine, deoxyinosine, thymine, ribonebularine, 2'-O-methylnebularine, or 2'-deoxynebularine

SEQ ID NO: 2783 - RNA, 103 nt, synthetic construct; identical to SEQ ID NO: 1796
  source 1..103: mol_type = other RNA
  modified_base 1: mod_base = OTHER; note = 2'-O-Methyl-guanosine phosphorothioate
  modified_base 2: mod_base = OTHER; note = 2'-O-Methyl-adenosine phosphorothioate
  modified_base 3: mod_base = OTHER; note = 2'-O-Methyl-guanosine phosphorothioate
  modified_base 21: mod_base = OTHER; note = 2'-O-Methyl-guanosine
  modified_base 28: mod_base = OTHER; note = 2'-O-Methyl-adenosine
  modified_base 29: mod_base = OTHER; note = 2'-O-Methyl-guanosine
  modified_base 30: mod_base = OTHER; note = 2'-O-Methyl-cytidine
  modified_base 31: mod_base = OTHER; note = 2'-O-Methyl-uridine
  modified_base 32: mod_base = OTHER; note = 2'-O-Methyl-adenosine
  modified_base 33: mod_base = OTHER; note = 2'-O-Methyl-guanosine
  modified_base 34: mod_base = OTHER; note = 2'-O-Methyl-adenosine
  modified_base 35: mod_base = OTHER; note = 2'-O-Methyl-adenosine
  modified_base 36: mod_base = OTHER; note = 2'-O-Methyl-adenosine
  modified_base 37: mod_base = OTHER; note = 2'-O-Methyl-uridine
  modified_base 38: mod_base = OTHER; note = 2'-O-Methyl-adenosine
  modified_base 39: mod_base = OTHER; note = 2'-O-Methyl-guanosine
  modified_base 40: mod_base = OTHER; note = 2'-O-Methyl-cytidine
  modified_base 41: mod_base = OTHER; note = 2'-O-Methyl-adenosine
  modified_base 42: mod_base = OTHER; note = 2'-O-Methyl-adenosine
  modified_base 45: mod_base = OTHER; note = uridine phosphorothioate
  modified_base 46: mod_base = OTHER; note = 2'-O-Methyl-adenosine
  modified_base 48: mod_base = OTHER; note = 2'-O-Methyl-adenosine
  modified_base 50: mod_base = OTHER; note = 2'-O-Methyl-uridine
  modified_base 52: mod_base = OTHER; note = 2'-O-Methyl-adenosine
  modified_base 53: mod_base = OTHER; note = 2'-O-Methyl-guanosine
  modified_base 54: mod_base = OTHER; note = 2'-O-Methyl-guanosine
  modified_base 55: mod_base = OTHER; note = 2'-O-Methyl-cytidine
  modified_base 56: mod_base = OTHER; note = 2'-O-Methyl-uridine
  modified_base 57: mod_base = OTHER; note = 2'-O-Methyl-adenosine
  modified_base 60: mod_base = OTHER; note = 2'-O-Methyl-cytidine
  modified_base 61: mod_base = OTHER; note = 2'-O-Methyl-cytidine
  modified_base 66: mod_base = OTHER; note = 2'-O-Methyl-uridine
  modified_base 67: mod_base = OTHER; note = 2'-O-Methyl-cytidine
  modified_base 70: mod_base = OTHER; note = 2'-O-Methyl-cytidine
  modified_base 71: mod_base = OTHER; note = 2'-O-Methyl-uridine
  modified_base 72: mod_base = OTHER; note = 2'-O-Methyl-uridine
  modified_base 73: mod_base = OTHER; note = 2'-O-Methyl-guanosine
  modified_base 74: mod_base = OTHER; note = 2'-O-Methyl-adenosine
  modified_base 75: mod_base = OTHER; note = 2'-O-Methyl-adenosine
  modified_base 76: mod_base = OTHER; note = 2'-O-Methyl-adenosine
  modified_base 77: mod_base = OTHER; note = 2'-O-Methyl-adenosine
  modified_base 78: mod_base = OTHER; note = 2'-O-Methyl-adenosine
  modified_base 79: mod_base = OTHER; note = 2'-O-Methyl-guanosine
  modified_base 80: mod_base = OTHER; note = 2'-O-Methyl-uridine
  modified_base 81: mod_base = OTHER; note = 2'-O-Methyl-guanosine
  modified_base 83: mod_base = OTHER; note = 2'-O-Methyl-cytidine
  modified_base 84: mod_base = OTHER; note = 2'-O-Methyl-adenosine
  modified_base 85: mod_base = OTHER; note = 2'-O-Methyl-cytidine
  modified_base 86: mod_base = OTHER; note = 2'-O-Methyl-cytidine
  modified_base 87: mod_base = OTHER; note = 2'-O-Methyl-guanosine
  modified_base 88: mod_base = OTHER; note = 2'-O-Methyl-adenosine
  modified_base 89: mod_base = OTHER; note = 2'-O-Methyl-guanosine
  modified_base 90: mod_base = OTHER; note = 2'-O-Methyl-uridine
  modified_base 91: mod_base = OTHER; note = 2'-O-Methyl-cytidine
  modified_base 92: mod_base = OTHER; note = 2'-O-Methyl-guanosine
  modified_base 93: mod_base = OTHER; note = 2'-O-Methyl-guanosine
  modified_base 94: mod_base = OTHER; note = 2'-O-Methyl-uridine
  modified_base 95: mod_base = OTHER; note = 2'-O-Methyl-guanosine
  modified_base 96: mod_base = OTHER; note = 2'-O-Methyl-cytidine
  modified_base 97: mod_base = OTHER; note = 2'-O-Methyl-uridine phosphorothioate
  modified_base 98: mod_base = OTHER; note = 2'-O-Methyl-uridine phosphorothioate
  modified_base 99: mod_base = OTHER; note = 2'-O-Methyl-uridine phosphorothioate
  modified_base 100: mod_base = OTHER; note = 2'-O-Methyl-uridine
  misc_difference 101: note = a, c, g, inosine, u, deoxyadenosine, deoxyguanosine, deoxycytidine, deoxyinosine, thymine, ribonebularine, 2'-O-methylnebularine, or 2'-deoxynebularine
  misc_difference 102: note = a, c, g, inosine, u, deoxyadenosine, deoxyguanosine, deoxycytidine, deoxyinosine, thymine, ribonebularine, 2'-O-methylnebularine, or 2'-deoxynebularine
  misc_difference 103: note = a, c, g, inosine, u, deoxyadenosine, deoxyguanosine, deoxycytidine, deoxyinosine, thymine, ribonebularine, 2'-O-methylnebularine, or 2'-deoxynebularine

SEQ ID NO: 2784 - RNA, 103 nt, synthetic construct; identical to SEQ ID NO: 1796
  source 1..103: mol_type = other RNA
  modified_base 1: mod_base = OTHER; note = 2'-O-Methyl-guanosine phosphorothioate
  modified_base 2: mod_base = OTHER; note = 2'-O-Methyl-adenosine phosphorothioate
  modified_base 3: mod_base = OTHER; note = 2'-O-Methyl-guanosine phosphorothioate
  modified_base 21: mod_base = OTHER; note = 2'-O-Methyl-guanosine
  modified_base 28: mod_base = OTHER; note = 2'-O-Methyl-adenosine
  modified_base 29: mod_base = OTHER; note = 2'-O-Methyl-guanosine
  modified_base 30: mod_base = OTHER; note = 2'-O-Methyl-cytidine
  modified_base 31: mod_base = OTHER; note = 2'-O-Methyl-uridine
  modified_base 32: mod_base = OTHER; note = 2'-O-Methyl-adenosine
  modified_base 34: mod_base = OTHER; note = 2'-O-Methyl-adenosine
  modified_base 35: mod_base = OTHER; note = 2'-O-Methyl-adenosine
  modified_base 36: mod_base = OTHER; note = 2'-O-Methyl-adenosine
  modified_base 37: mod_base = OTHER; note = 2'-O-Methyl-uridine
  modified_base 38: mod_base = OTHER; note = 2'-O-Methyl-adenosine
  modified_base 39: mod_base = OTHER; note = 2'-O-Methyl-guanosine
  modified_base 40: mod_base = OTHER; note = 2'-O-Methyl-cytidine
  modified_base 41: mod_base = OTHER; note = 2'-O-Methyl-adenosine
  modified_base 42: mod_base = OTHER; note = 2'-O-Methyl-adenosine
  modified_base 45: mod_base = OTHER; note = uridine phosphorothioate
  modified_base 46: mod_base = OTHER; note = 2'-O-Methyl-adenosine
  modified_base 48: mod_base = OTHER; note = 2'-O-Methyl-adenosine
  modified_base 50: mod_base = OTHER; note = 2'-O-Methyl-uridine
  modified_base 52: mod_base = OTHER; note = 2'-O-Methyl-adenosine
  modified_base 53: mod_base = OTHER; note = 2'-O-Methyl-guanosine
  modified_base 54: mod_base = OTHER; note = 2'-O-Methyl-guanosine
  modified_base 55: mod_base = OTHER; note = 2'-O-Methyl-cytidine
  modified_base 56: mod_base = OTHER; note = 2'-O-Methyl-uridine
  modified_base 57: mod_base = OTHER; note = 2'-O-Methyl-adenosine
  modified_base 60: mod_base = OTHER; note = 2'-O-Methyl-cytidine
  modified_base 61: mod_base = OTHER; note = 2'-O-Methyl-cytidine
  modified_base 66: mod_base = OTHER; note = 2'-O-Methyl-uridine
  modified_base 67: mod_base = OTHER; note = 2'-O-Methyl-cytidine
  modified_base 70: mod_base = OTHER; note = 2'-O-Methyl-cytidine
  modified_base 71: mod_base = OTHER; note = 2'-O-Methyl-uridine
  modified_base 72: mod_base = OTHER; note = 2'-O-Methyl-uridine
  modified_base 74: mod_base = OTHER; note = 2'-O-Methyl-adenosine
  modified_base 75: mod_base = OTHER; note = 2'-O-Methyl-adenosine
  modified_base 76: mod_base = OTHER; note = 2'-O-Methyl-adenosine
  modified_base 77: mod_base = OTHER; note = 2'-O-Methyl-adenosine
  modified_base 78: mod_base = OTHER; note = 2'-O-Methyl-adenosine
  modified_base 79: mod_base = OTHER; note = 2'-O-Methyl-guanosine
  modified_base 80: mod_base = OTHER; note = 2'-O-Methyl-uridine
  modified_base 81: mod_base = OTHER; note = 2'-O-Methyl-guanosine
  modified_base 83: mod_base = OTHER; note = 2'-O-Methyl-cytidine
  modified_base 84: mod_base = OTHER; note = 2'-O-Methyl-adenosine
  modified_base 85: mod_base = OTHER; note = 2'-O-Methyl-cytidine
  modified_base 86: mod_base = OTHER; note = 2'-O-Methyl-cytidine
  modified_base 87: mod_base = OTHER; note = 2'-O-Methyl-guanosine
  modified_base 88: mod_base = OTHER; note = 2'-O-Methyl-adenosine
  modified_base 89: mod_base = OTHER; note = 2'-O-Methyl-guanosine
  modified_base 90: mod_base = OTHER; note = 2'-O-Methyl-uridine
  modified_base 91: mod_base = OTHER; note = 2'-O-Methyl-cytidine
  modified_base 92: mod_base = OTHER; note = 2'-O-Methyl-guanosine
  modified_base 93: mod_base = OTHER; note = 2'-O-Methyl-guanosine
  modified_base 94: mod_base = OTHER; note = 2'-O-Methyl-uridine
  modified_base 95: mod_base = OTHER; note = 2'-O-Methyl-guanosine
  modified_base 96: mod_base = OTHER; note = 2'-O-Methyl-cytidine
  modified_base 97: mod_base = OTHER; note = 2'-O-Methyl-uridine phosphorothioate
  modified_base 98: mod_base = OTHER; note = 2'-O-Methyl-uridine phosphorothioate
  modified_base 99: mod_base = OTHER; note = 2'-O-Methyl-uridine phosphorothioate
  modified_base 100: mod_base = OTHER; note = 2'-O-Methyl-uridine
  misc_difference 101: note = a, c, g, inosine, u, deoxyadenosine, deoxyguanosine, deoxycytidine, deoxyinosine, thymine, ribonebularine, 2'-O-methylnebularine, or 2'-deoxynebularine
  misc_difference 102: note = a, c, g, inosine, u, deoxyadenosine, deoxyguanosine, deoxycytidine, deoxyinosine, thymine, ribonebularine, 2'-O-methylnebularine, or 2'-deoxynebularine
  misc_difference 103: note = a, c, g, inosine, u, deoxyadenosine, deoxyguanosine, deoxycytidine, deoxyinosine, thymine, ribonebularine, 2'-O-methylnebularine, or 2'-deoxynebularine

SEQ ID NO: 2785 - RNA, 103 nt, synthetic construct; identical to SEQ ID NO: 1797
  source 1..103: mol_type = other RNA
  modified_base 1: mod_base = OTHER; note = 2'-O-Methyl-cytidine phosphorothioate
  modified_base 2: mod_base = OTHER; note = 2'-O-Methyl-adenosine phosphorothioate
  modified_base 3: mod_base = OTHER; note = 2'-O-Methyl-guanosine phosphorothioate
  modified_base 21: mod_base = OTHER; note = 2'-O-Methyl-guanosine
  modified_base 28: mod_base = OTHER; note = 2'-O-Methyl-adenosine
  modified_base 29: mod_base = OTHER; note = 2'-O-Methyl-guanosine
  modified_base 30: mod_base = OTHER; note = 2'-O-Methyl-cytidine
  modified_base 31: mod_base = OTHER; note = 2'-O-Methyl-uridine
  modified_base 32: mod_base = OTHER; note = 2'-O-Methyl-adenosine
  modified_base 33: mod_base = OTHER; note = 2'-O-Methyl-guanosine
  modified_base 34: mod_base = OTHER; note = 2'-O-Methyl-adenosine
  modified_base 35: mod_base = OTHER; note = 2'-O-Methyl-adenosine
  modified_base 36: mod_base = OTHER; note = 2'-O-Methyl-adenosine
  modified_base 37: mod_base = OTHER; note = 2'-O-Methyl-uridine
  modified_base 38: mod_base = OTHER; note = 2'-O-Methyl-adenosine
  modified_base 39: mod_base = OTHER; note = 2'-O-Methyl-guanosine
  modified_base 40: mod_base = OTHER; note = 2'-O-Methyl-cytidine
  modified_base 41: mod_base = OTHER; note = 2'-O-Methyl-adenosine
  modified_base 42: mod_base = OTHER; note = 2'-O-Methyl-adenosine
  modified_base 45: mod_base = OTHER; note = uridine phosphorothioate
  modified_base 46: mod_base = OTHER; note = 2'-O-Methyl-adenosine
  modified_base 48: mod_base = OTHER; note = 2'-O-Methyl-adenosine
  modified_base 50: mod_base = OTHER; note = 2'-O-Methyl-uridine
  modified_base 52: mod_base = OTHER; note = 2'-O-Methyl-adenosine
  modified_base 53: mod_base = OTHER; note = 2'-O-Methyl-guanosine
  modified_base 54: mod_base = OTHER; note = 2'-O-Methyl-guanosine
  modified_base 57: mod_base = OTHER; note = 2'-O-Methyl-adenosine
  modified_base 61: mod_base = OTHER; note = 2'-O-Methyl-cytidine
  modified_base 66: mod_base = OTHER; note = 2'-O-Methyl-uridine
  modified_base 67: mod_base = OTHER; note = 2'-O-Methyl-cytidine
  modified_base 70: mod_base = OTHER; note = 2'-O-Methyl-cytidine
  modified_base 71: mod_base = OTHER; note = 2'-O-Methyl-uridine
  modified_base 72: mod_base = OTHER; note = 2'-O-Methyl-uridine
  modified_base 74: mod_base = OTHER; note = 2'-O-Methyl-adenosine
  modified_base 75: mod_base = OTHER; note = 2'-O-Methyl-adenosine
  modified_base 76: mod_base = OTHER; note = 2'-O-Methyl-adenosine
  modified_base 77: mod_base = OTHER; note = 2'-O-Methyl-adenosine
  modified_base 78: mod_base = OTHER; note = 2'-O-Methyl-adenosine
  modified_base 79: mod_base = OTHER; note = 2'-O-Methyl-guanosine
  modified_base 80: mod_base = OTHER; note = 2'-O-Methyl-uridine
  modified_base 82: mod_base = OTHER; note = 2'-O-Methyl-guanosine
  modified_base 83: mod_base = OTHER; note = 2'-O-Methyl-cytidine
  modified_base 84: mod_base = OTHER; note = 2'-O-Methyl-adenosine
  modified_base 85: mod_base = OTHER; note = 2'-O-Methyl-cytidine
  modified_base 86: mod_base = OTHER; note = 2'-O-Methyl-cytidine
  modified_base 87: mod_base = OTHER; note = 2'-O-Methyl-guanosine
  modified_base 89: mod_base = OTHER; note = 2'-O-Methyl-guanosine
  modified_base 92: mod_base = OTHER; note = 2'-O-Methyl-guanosine
  modified_base 93: mod_base = OTHER; note = 2'-O-Methyl-guanosine
  modified_base 94: mod_base = OTHER; note = 2'-O-Methyl-uridine
  modified_base 95: mod_base = OTHER; note = 2'-O-Methyl-guanosine
  modified_base 96: mod_base = OTHER; note = 2'-O-Methyl-cytidine
  modified_base 97: mod_base = OTHER; note = 2'-O-Methyl-uridine phosphorothioate
  modified_base 98: mod_base = OTHER; note = 2'-O-Methyl-uridine phosphorothioate
  modified_base 99: mod_base = OTHER; note = 2'-O-Methyl-uridine phosphorothioate
  modified_base 100: mod_base = OTHER; note = 2'-O-Methyl-uridine
  misc_difference 101: note = a, c, g, inosine, u, deoxyadenosine, deoxyguanosine, deoxycytidine, deoxyinosine, thymine, ribonebularine, 2'-O-methylnebularine, or 2'-deoxynebularine
  misc_difference 102: note = a, c, g, inosine, u, deoxyadenosine, deoxyguanosine, deoxycytidine, deoxyinosine, thymine, ribonebularine, 2'-O-methylnebularine, or 2'-deoxynebularine
  misc_difference 103: note = a, c, g, inosine, u, deoxyadenosine, deoxyguanosine, deoxycytidine, deoxyinosine, thymine, ribonebularine, 2'-O-methylnebularine, or 2'-deoxynebularine

SEQ ID NO: 2786 - RNA, 103 nt, synthetic construct; identical to SEQ ID NO: 1797
  source 1..103: mol_type = other RNA
  modified_base 1: mod_base = OTHER; note = 2'-O-Methyl-cytidine phosphorothioate
  modified_base 2: mod_base = OTHER; note = 2'-O-Methyl-adenosine phosphorothioate
  modified_base 3: mod_base = OTHER; note = 2'-O-Methyl-guanosine phosphorothioate
  modified_base 21: mod_base = OTHER; note = 2'-O-Methyl-guanosine
  modified_base 28: mod_base = OTHER; note = 2'-O-Methyl-adenosine
  modified_base 29: mod_base = OTHER; note = 2'-O-Methyl-guanosine
  modified_base 30: mod_base = OTHER; note = 2'-O-Methyl-cytidine
  modified_base 31: mod_base = OTHER; note = 2'-O-Methyl-uridine
  modified_base 32: mod_base = OTHER; note = 2'-O-Methyl-adenosine
  modified_base 33: mod_base = OTHER; note = 2'-O-Methyl-guanosine
  modified_base 34: mod_base = OTHER; note = 2'-O-Methyl-adenosine
  modified_base 35: mod_base = OTHER; note = 2'-O-Methyl-adenosine
  modified_base 36: mod_base = OTHER; note = 2'-O-Methyl-adenosine
  modified_base 37: mod_base = OTHER; note = 2'-O-Methyl-uridine
  modified_base 38: mod_base = OTHER; note = 2'-O-Methyl-adenosine
  modified_base 39: mod_base = OTHER; note = 2'-O-Methyl-guanosine
  modified_base 40: mod_base = OTHER; note = 2'-O-Methyl-cytidine
  modified_base 41: mod_base = OTHER; note = 2'-O-Methyl-adenosine
  modified_base 42: mod_base = OTHER; note = 2'-O-Methyl-adenosine
  modified_base 45: mod_base = OTHER; note = uridine phosphorothioate
  modified_base 46: mod_base = OTHER; note = 2'-O-Methyl-adenosine
  modified_base 48: mod_base = OTHER; note = 2'-O-Methyl-adenosine
  modified_base 50: mod_base = OTHER; note = 2'-O-Methyl-uridine
  modified_base 52: mod_base = OTHER; note = 2'-O-Methyl-adenosine
  modified_base 53: mod_base = OTHER; note = 2'-O-Methyl-guanosine
  modified_base 54: mod_base = OTHER; note = 2'-O-Methyl-guanosine
  modified_base 55: mod_base = OTHER; note = 2'-O-Methyl-cytidine
  modified_base 56: mod_base = OTHER; note = 2'-O-Methyl-uridine
  modified_base 57: mod_base = OTHER; note = 2'-O-Methyl-adenosine
  modified_base 60: mod_base = OTHER; note = 2'-O-Methyl-cytidine
  modified_base 61: mod_base = OTHER; note = 2'-O-Methyl-cytidine
  modified_base 66: mod_base = OTHER; note = 2'-O-Methyl-uridine
  modified_base 67: mod_base = OTHER; note = 2'-O-Methyl-cytidine
  modified_base 70: mod_base = OTHER; note = 2'-O-Methyl-cytidine
  modified_base 71: mod_base = OTHER; note = 2'-O-Methyl-uridine
  modified_base 72: mod_base = OTHER; note = 2'-O-Methyl-uridine
  modified_base 74: mod_base = OTHER; note = 2'-O-Methyl-adenosine
  modified_base 75: mod_base = OTHER; note = 2'-O-Methyl-adenosine
  modified_base 76: mod_base = OTHER; note = 2'-O-Methyl-adenosine
  modified_base 77: mod_base = OTHER; note = 2'-O-Methyl-adenosine
  modified_base 78: mod_base = OTHER; note = 2'-O-Methyl-adenosine
  modified_base 79: mod_base = OTHER; note = 2'-O-Methyl-guanosine
  modified_base 80: mod_base = OTHER; note = 2'-O-Methyl-uridine
  modified_base 82: mod_base = OTHER; note = 2'-O-Methyl-guanosine
  modified_base 83: mod_base = OTHER; note = 2'-O-Methyl-cytidine
  modified_base 84: mod_base = OTHER; note = 2'-O-Methyl-adenosine
  modified_base 85: mod_base = OTHER; note = 2'-O-Methyl-cytidine
  modified_base 86: mod_base = OTHER; note = 2'-O-Methyl-cytidine
  modified_base 87: mod_base = OTHER; note = 2'-O-Methyl-guanosine
  modified_base 89: mod_base = OTHER; note = 2'-O-Methyl-guanosine
  modified_base 92: mod_base = OTHER; note = 2'-O-Methyl-guanosine
  modified_base 93: mod_base = OTHER; note = 2'-O-Methyl-guanosine
  modified_base 94: mod_base = OTHER; note = 2'-O-Methyl-uridine
  modified_base 95: mod_base = OTHER; note = 2'-O-Methyl-guanosine
  modified_base 96: mod_base = OTHER; note = 2'-O-Methyl-cytidine
  modified_base 97: mod_base = OTHER; note = 2'-O-Methyl-uridine phosphorothioate
  modified_base 98: mod_base = OTHER; note = 2'-O-Methyl-uridine phosphorothioate
  modified_base 99: mod_base = OTHER; note = 2'-O-Methyl-uridine phosphorothioate
  modified_base 100: mod_base = OTHER; note = 2'-O-Methyl-uridine
  misc_difference 101: note = a, c, g, inosine, u, deoxyadenosine, deoxyguanosine, deoxycytidine, deoxyinosine, thymine, ribonebularine, 2'-O-methylnebularine, or 2'-deoxynebularine
  misc_difference 102: note = a, c, g, inosine, u, deoxyadenosine, deoxyguanosine, deoxycytidine, deoxyinosine, thymine, ribonebularine, 2'-O-methylnebularine, or 2'-deoxynebularine
  misc_difference 103: note = a, c, g, inosine, u, deoxyadenosine, deoxyguanosine, deoxycytidine, deoxyinosine, thymine, ribonebularine, 2'-O-methylnebularine, or 2'-deoxynebularine

SEQ ID NO: 2787 - RNA, 103 nt, synthetic construct; identical to SEQ ID NO: 1797
  source 1..103: mol_type = other RNA
  modified_base 1: mod_base = OTHER; note = 2'-O-Methyl-cytidine phosphorothioate
  modified_base 2: mod_base = OTHER; note = 2'-O-Methyl-adenosine phosphorothioate
  modified_base 3: mod_base = OTHER; note = 2'-O-Methyl-guanosine phosphorothioate
  modified_base 21: mod_base = OTHER; note = 2'-O-Methyl-guanosine
  modified_base 28: mod_base = OTHER; note = 2'-O-Methyl-adenosine
  modified_base 29: mod_base = OTHER; note = 2'-O-Methyl-guanosine
  modified_base 30: mod_base = OTHER; note = 2'-O-Methyl-cytidine
  modified_base 31: mod_base = OTHER; note = 2'-O-Methyl-uridine
  modified_base 32: mod_base = OTHER; note = 2'-O-Methyl-adenosine
  modified_base 33: mod_base = OTHER; note = 2'-O-Methyl-guanosine
  modified_base 34: mod_base = OTHER; note = 2'-O-Methyl-adenosine
  modified_base 35: mod_base = OTHER; note = 2'-O-Methyl-adenosine
  modified_base 36: mod_base = OTHER; note = 2'-O-Methyl-adenosine
  modified_base 37: mod_base = OTHER; note = 2'-O-Methyl-uridine
  modified_base 38: mod_base = OTHER; note = 2'-O-Methyl-adenosine
  modified_base 39: mod_base = OTHER; note = 2'-O-Methyl-guanosine
  modified_base 40: mod_base = OTHER; note = 2'-O-Methyl-cytidine
  modified_base 41: mod_base = OTHER; note = 2'-O-Methyl-adenosine
  modified_base 42: mod_base = OTHER; note = 2'-O-Methyl-adenosine
  modified_base 45: mod_base = OTHER; note = uridine phosphorothioate
  modified_base 46: mod_base = OTHER; note = 2'-O-Methyl-adenosine
  modified_base 48: mod_base = OTHER; note = 2'-O-Methyl-adenosine
  modified_base 50: mod_base = OTHER; note = 2'-O-Methyl-uridine
  modified_base 52: mod_base = OTHER; note = 2'-O-Methyl-adenosine
  modified_base 53: mod_base = OTHER; note = 2'-O-Methyl-guanosine
  modified_base 54: mod_base = OTHER; note = 2'-O-Methyl-guanosine
  modified_base 57: mod_base = OTHER; note = 2'-O-Methyl-adenosine
  modified_base 61: mod_base = OTHER; note = 2'-O-Methyl-cytidine
  modified_base 66: mod_base = OTHER; note = 2'-O-Methyl-uridine
  modified_base 67: mod_base = OTHER; note = 2'-O-Methyl-cytidine
  modified_base 70: mod_base = OTHER; note = 2'-O-Methyl-cytidine
  modified_base 71: mod_base = OTHER; note = 2'-O-Methyl-uridine
  modified_base 72: mod_base = OTHER; note = 2'-O-Methyl-uridine
  modified_base 73: mod_base = OTHER; note = 2'-O-Methyl-guanosine
  modified_base 74: mod_base = OTHER; note = 2'-O-Methyl-adenosine
  modified_base 75: mod_base = OTHER; note = 2'-O-Methyl-adenosine
  modified_base 76: mod_base = OTHER; note = 2'-O-Methyl-adenosine
  modified_base 77: mod_base = OTHER; note = 2'-O-Methyl-adenosine
  modified_base 78: mod_base = OTHER; note = 2'-O-Methyl-adenosine
  modified_base 79: mod_base = OTHER; note = 2'-O-Methyl-guanosine
  modified_base 80: mod_base = OTHER; note = 2'-O-Methyl-uridine
  modified_base 82: mod_base = OTHER; note = 2'-O-Methyl-guanosine
  modified_base 83: mod_base = OTHER; note = 2'-O-Methyl-cytidine
  modified_base 84: mod_base = OTHER; note = 2'-O-Methyl-adenosine
  modified_base 85: mod_base = OTHER; note = 2'-O-Methyl-cytidine
  modified_base 86: mod_base = OTHER; note = 2'-O-Methyl-cytidine
  modified_base 87: mod_base = OTHER; note = 2'-O-Methyl-guanosine
  modified_base 89: mod_base = OTHER; note = 2'-O-Methyl-guanosine
  modified_base 92: mod_base = OTHER; note = 2'-O-Methyl-guanosine
  modified_base 93: mod_base = OTHER; note = 2'-O-Methyl-guanosine
  modified_base 94: mod_base = OTHER; note = 2'-O-Methyl-uridine
  modified_base 95: mod_base = OTHER; note = 2'-O-Methyl-guanosine
  modified_base 96: mod_base = OTHER; note = 2'-O-Methyl-cytidine
  modified_base 97: mod_base = OTHER; note = 2'-O-Methyl-uridine phosphorothioate
  modified_base 98: mod_base = OTHER; note = 2'-O-Methyl-uridine phosphorothioate
  modified_base 99: mod_base = OTHER; note = 2'-O-Methyl-uridine phosphorothioate
  modified_base 100: mod_base = OTHER; note = 2'-O-Methyl-uridine
  misc_difference 101: note = a, c, g, inosine, u, deoxyadenosine, deoxyguanosine, deoxycytidine, deoxyinosine, thymine, ribonebularine, 2'-O-methylnebularine, or 2'-deoxynebularine
  misc_difference 102: note = a, c, g, inosine, u, deoxyadenosine, deoxyguanosine, deoxycytidine, deoxyinosine, thymine, ribonebularine, 2'-O-methylnebularine, or 2'-deoxynebularine
  misc_difference 103: note = a, c, g, inosine, u, deoxyadenosine, deoxyguanosine, deoxycytidine, deoxyinosine, thymine, ribonebularine, 2'-O-methylnebularine, or 2'-deoxynebularine

SEQ ID NO: 2788 - RNA, 103 nt, synthetic construct; identical to SEQ ID NO: 1797
  source 1..103: mol_type = other RNA
  modified_base 1: mod_base = OTHER; note = 2'-O-Methyl-cytidine phosphorothioate
  modified_base 2: mod_base = OTHER; note = 2'-O-Methyl-adenosine phosphorothioate
  modified_base 3: mod_base = OTHER; note = 2'-O-Methyl-guanosine phosphorothioate
  modified_base 21: mod_base = OTHER; note = 2'-O-Methyl-guanosine
  modified_base 28: mod_base = OTHER; note = 2'-O-Methyl-adenosine
  modified_base 29: mod_base = OTHER; note = 2'-O-Methyl-guanosine
  modified_base 30: mod_base = OTHER; note = 2'-O-Methyl-cytidine
  modified_base 31: mod_base = OTHER; note = 2'-O-Methyl-uridine
  modified_base 32: mod_base = OTHER; note = 2'-O-Methyl-adenosine
  modified_base 33: mod_base = OTHER; note = 2'-O-Methyl-guanosine
  modified_base 34: mod_base = OTHER; note = 2'-O-Methyl-adenosine
  modified_base 35: mod_base = OTHER; note = 2'-O-Methyl-adenosine
  modified_base 36: mod_base = OTHER; note = 2'-O-Methyl-adenosine
  modified_base 37: mod_base = OTHER; note = 2'-O-Methyl-uridine
  modified_base 38: mod_base = OTHER; note = 2'-O-Methyl-adenosine
  modified_base 39: mod_base = OTHER; note = 2'-O-Methyl-guanosine
  modified_base 40: mod_base = OTHER; note = 2'-O-Methyl-cytidine
  modified_base 41: mod_base = OTHER; note = 2'-O-Methyl-adenosine
  modified_base 42: mod_base = OTHER; note = 2'-O-Methyl-adenosine
  modified_base 45: mod_base = OTHER; note = uridine phosphorothioate
  modified_base 46: mod_base = OTHER; note = 2'-O-Methyl-adenosine
  modified_base 48: mod_base = OTHER; note = 2'-O-Methyl-adenosine
  modified_base 50: mod_base = OTHER; note = 2'-O-Methyl-uridine
  modified_base 52: mod_base = OTHER; note = 2'-O-Methyl-adenosine
  modified_base 53: mod_base = OTHER; note = 2'-O-Methyl-guanosine
  modified_base 54: mod_base = OTHER; note = 2'-O-Methyl-guanosine
  modified_base 57: mod_base = OTHER; note = 2'-O-Methyl-adenosine
  modified_base 61: mod_base = OTHER; note = 2'-O-Methyl-cytidine
  modified_base 66: mod_base = OTHER; note = 2'-O-Methyl-uridine
  modified_base 67: mod_base = OTHER; note = 2'-O-Methyl-cytidine
  modified_base 70: mod_base = OTHER; note = 2'-O-Methyl-cytidine
  modified_base 71: mod_base = OTHER; note = 2'-O-Methyl-uridine
  modified_base 72: mod_base = OTHER; note = 2'-O-Methyl-uridine
  modified_base 73: mod_base = OTHER; note = 2'-O-Methyl-guanosine
  modified_base 74: mod_base = OTHER; note = 2'-O-Methyl-adenosine
  modified_base 75: mod_base = OTHER; note = 2'-O-Methyl-adenosine
  modified_base 76: mod_base = OTHER; note = 2'-O-Methyl-adenosine
  modified_base 77: mod_base = OTHER; note = 2'-O-Methyl-adenosine
  modified_base 78: mod_base = OTHER; note = 2'-O-Methyl-adenosine
  modified_base 79: mod_base = OTHER; note = 2'-O-Methyl-guanosine
  modified_base 80: mod_base = OTHER; note = 2'-O-Methyl-uridine
  modified_base 82: mod_base = OTHER; note = 2'-O-Methyl-guanosine
  modified_base 83: mod_base = OTHER; note = 2'-O-Methyl-cytidine
  modified_base 84: mod_base = OTHER; note = 2'-O-Methyl-adenosine
  modified_base 85: mod_base = OTHER; note = 2'-O-Methyl-cytidine
  modified_base 86: mod_base = OTHER; note = 2'-O-Methyl-cytidine
  modified_base 87: mod_base = OTHER; note = 2'-O-Methyl-guanosine
  modified_base 89: mod_base = OTHER; note = 2'-O-Methyl-guanosine
  modified_base 91: mod_base = OTHER; note = 2'-O-Methyl-cytidine
  modified_base 92: mod_base = OTHER; note = 2'-O-Methyl-guanosine
  modified_base 93: mod_base = OTHER; note = 2'-O-Methyl-guanosine
  modified_base 94: mod_base = OTHER; note = 2'-O-Methyl-uridine
  modified_base 95: mod_base = OTHER; note = 2'-O-Methyl-guanosine
  modified_base 96: mod_base = OTHER; note = 2'-O-Methyl-cytidine
  modified_base 97: mod_base = OTHER; note = 2'-O-Methyl-uridine phosphorothioate
  modified_base 98: mod_base = OTHER; note = 2'-O-Methyl-uridine phosphorothioate
  modified_base 99: mod_base = OTHER; note = 2'-O-Methyl-uridine phosphorothioate
  modified_base 100: mod_base = OTHER; note = 2'-O-Methyl-uridine
  misc_difference 101: note = a, c, g, inosine, u, deoxyadenosine, deoxyguanosine, deoxycytidine, deoxyinosine, thymine, ribonebularine, 2'-O-methylnebularine, or 2'-deoxynebularine
  misc_difference 102: note = a, c, g, inosine, u, deoxyadenosine, deoxyguanosine, deoxycytidine, deoxyinosine, thymine, ribonebularine, 2'-O-methylnebularine, or 2'-deoxynebularine
  misc_difference 103: note = a, c, g, inosine, u, deoxyadenosine, deoxyguanosine, deoxycytidine, deoxyinosine, thymine, ribonebularine, 2'-O-methylnebularine, or 2'-deoxynebularine

SEQ ID NO: 2789 - RNA, 103 nt, synthetic construct; identical to SEQ ID NO: 1797
  source 1..103: mol_type = other RNA
  modified_base 1: mod_base = OTHER; note = 2'-O-Methyl-cytidine phosphorothioate
  modified_base 2: mod_base = OTHER; note = 2'-O-Methyl-adenosine phosphorothioate
  modified_base 3: mod_base = OTHER; note = 2'-O-Methyl-guanosine phosphorothioate
  modified_base 21: mod_base = OTHER; note = 2'-O-Methyl-guanosine
  modified_base 28: mod_base = OTHER; note = 2'-O-Methyl-adenosine
  modified_base 29: mod_base = OTHER; note = 2'-O-Methyl-guanosine
  modified_base 30: mod_base = OTHER; note = 2'-O-Methyl-cytidine
  modified_base 31: mod_base = OTHER; note = 2'-O-Methyl-uridine
  modified_base 32: mod_base = OTHER; note = 2'-O-Methyl-adenosine
  modified_base 34: mod_base = OTHER; note = 2'-O-Methyl-adenosine
  modified_base 35: mod_base = OTHER; note = 2'-O-Methyl-adenosine
  modified_base 36: mod_base = OTHER; note = 2'-O-Methyl-adenosine
  modified_base 37: mod_base = OTHER; note = 2'-O-Methyl-uridine
  modified_base 38: mod_base = OTHER; note = 2'-O-Methyl-adenosine
  modified_base 39: mod_base = OTHER; note = 2'-O-Methyl-guanosine
  modified_base 40: mod_base = OTHER; note = 2'-O-Methyl-cytidine
  modified_base 41: mod_base = OTHER; note = 2'-O-Methyl-adenosine
  modified_base 42: mod_base = OTHER; note = 2'-O-Methyl-adenosine
  modified_base 45: mod_base = OTHER; note = uridine phosphorothioate
  modified_base 46: mod_base = OTHER; note = 2'-O-Methyl-adenosine
  modified_base 48: mod_base = OTHER; note = 2'-O-Methyl-adenosine
  modified_base 50: mod_base = OTHER; note = 2'-O-Methyl-uridine
  modified_base 52: mod_base = OTHER; note = 2'-O-Methyl-adenosine
  modified_base 53: mod_base = OTHER; note = 2'-O-Methyl-guanosine
  modified_base 54: mod_base = OTHER; note = 2'-O-Methyl-guanosine
  modified_base 57: mod_base = OTHER; note = 2'-O-Methyl-adenosine
  modified_base 61: mod_base = OTHER; note = 2'-O-Methyl-cytidine
  modified_base 66: mod_base = OTHER; note = 2'-O-Methyl-uridine
  modified_base 67: mod_base = OTHER; note = 2'-O-Methyl-cytidine
  modified_base 70: mod_base = OTHER; note = 2'-O-Methyl-cytidine
  modified_base 71: mod_base = OTHER; note = 2'-O-Methyl-uridine
  modified_base 72: mod_base = OTHER; note = 2'-O-Methyl-uridine
  modified_base 73: mod_base = OTHER; note = 2'-O-Methyl-guanosine
  modified_base 74: mod_base = OTHER; note = 2'-O-Methyl-adenosine
  modified_base 75: mod_base = OTHER; note = 2'-O-Methyl-adenosine
  modified_base 76: mod_base = OTHER; note = 2'-O-Methyl-adenosine
  modified_base 77: mod_base = OTHER; note = 2'-O-Methyl-adenosine
  modified_base 78: mod_base = OTHER; note = 2'-O-Methyl-adenosine
  modified_base 79: mod_base = OTHER; note = 2'-O-Methyl-guanosine
  modified_base 80: mod_base = OTHER; note = 2'-O-Methyl-uridine
  modified_base 82: mod_base = OTHER; note = 2'-O-Methyl-guanosine
  modified_base 83: mod_base = OTHER; note = 2'-O-Methyl-cytidine
  modified_base 84: mod_base = OTHER; note = 2'-O-Methyl-adenosine
  modified_base 85: mod_base = OTHER; note = 2'-O-Methyl-cytidine
  modified_base 86: mod_base = OTHER; note = 2'-O-Methyl-cytidine
  modified_base 87: mod_base = OTHER; note = 2'-O-Methyl-guanosine
  modified_base 89: mod_base = OTHER; note = 2'-O-Methyl-guanosine
  modified_base 92: mod_base = OTHER; note = 2'-O-Methyl-guanosine
  modified_base 93: mod_base = OTHER; note = 2'-O-Methyl-guanosine
  modified_base 94: mod_base = OTHER; note = 2'-O-Methyl-uridine
  modified_base 95: mod_base = OTHER; note = 2'-O-Methyl-guanosine
  modified_base 96: mod_base = OTHER; note = 2'-O-Methyl-cytidine
  modified_base 97: mod_base = OTHER; note = 2'-O-Methyl-uridine phosphorothioate
  modified_base 98: mod_base = OTHER; note = 2'-O-Methyl-uridine phosphorothioate
  modified_base 99: mod_base = OTHER; note = 2'-O-Methyl-uridine phosphorothioate
  modified_base 100: mod_base = OTHER; note = 2'-O-Methyl-uridine
  misc_difference 101: note = a, c, g, inosine, u, deoxyadenosine, deoxyguanosine, deoxycytidine, deoxyinosine, thymine, ribonebularine, 2'-O-methylnebularine, or 2'-deoxynebularine
  misc_difference 102: note = a, c, g, inosine, u, deoxyadenosine, deoxyguanosine, deoxycytidine, deoxyinosine, thymine, ribonebularine, 2'-O-methylnebularine, or 2'-deoxynebularine
  misc_difference 103: note = a, c, g, inosine, u, deoxyadenosine, deoxyguanosine, deoxycytidine, deoxyinosine, thymine, ribonebularine, 2'-O-methylnebularine, or 2'-deoxynebularine

SEQ ID NO: 2790 - RNA, 103 nt, synthetic construct; identical to SEQ ID NO: 1797
  source 1..103: mol_type = other RNA
  modified_base 1: mod_base = OTHER; note = 2'-O-Methyl-cytidine phosphorothioate
  modified_base 2: mod_base = OTHER; note = 2'-O-Methyl-adenosine phosphorothioate
  modified_base 3: mod_base = OTHER; note = 2'-O-Methyl-guanosine phosphorothioate
  modified_base 21: mod_base = OTHER; note = 2'-O-Methyl-guanosine
  modified_base 28: mod_base = OTHER; note = 2'-O-Methyl-adenosine
  modified_base 29: mod_base = OTHER; note = 2'-O-Methyl-guanosine
  modified_base 30: mod_base = OTHER; note = 2'-O-Methyl-cytidine
  modified_base 31: mod_base = OTHER; note = 2'-O-Methyl-uridine
  modified_base 32: mod_base = OTHER; note = 2'-O-Methyl-adenosine
  modified_base 34: mod_base = OTHER; note = 2'-O-Methyl-adenosine
  modified_base 35: mod_base = OTHER; note = 2'-O-Methyl-adenosine
  modified_base 36: mod_base = OTHER; note = 2'-O-Methyl-adenosine
  modified_base 37: mod_base = OTHER; note = 2'-O-Methyl-uridine
  modified_base 38: mod_base = OTHER; note = 2'-O-Methyl-adenosine
  modified_base 39: mod_base = OTHER; note = 2'-O-Methyl-guanosine
  modified_base 40: mod_base = OTHER; note = 2'-O-Methyl-cytidine
  modified_base 41: mod_base = OTHER; note = 2'-O-Methyl-adenosine
  modified_base 42: mod_base = OTHER; note = 2'-O-Methyl-adenosine
  modified_base 45: mod_base = OTHER; note = uridine phosphorothioate
  modified_base 46: mod_base = OTHER; note = 2'-O-Methyl-adenosine
  modified_base 48: mod_base = OTHER; note = 2'-O-Methyl-adenosine
  modified_base 50: mod_base = OTHER; note = 2'-O-Methyl-uridine
  modified_base 52: mod_base = OTHER; note = 2'-O-Methyl-adenosine
  modified_base 53: mod_base = OTHER; note = 2'-O-Methyl-guanosine
  modified_base 54: mod_base = OTHER; note = 2'-O-Methyl-guanosine
  modified_base 57: mod_base = OTHER; note = 2'-O-Methyl-adenosine
  modified_base 61: mod_base = OTHER; note = 2'-O-Methyl-cytidine
  modified_base 66: mod_base = OTHER; note = 2'-O-Methyl-uridine
  modified_base 67: mod_base = OTHER; note = 2'-O-Methyl-cytidine
  modified_base 70: mod_base = OTHER; note = 2'-O-Methyl-cytidine
  modified_base 71: mod_base = OTHER; note = 2'-O-Methyl-uridine
  modified_base 72: mod_base = OTHER; note = 2'-O-Methyl-uridine
  modified_base 73: mod_base = OTHER; note = 2'-O-Methyl-guanosine
  modified_base 74: mod_base = OTHER; note = 2'-O-Methyl-adenosine
  modified_base 75: mod_base = OTHER; note = 2'-O-Methyl-adenosine
  modified_base 76: mod_base = OTHER; note = 2'-O-Methyl-adenosine
  modified_base 77: mod_base = OTHER; note = 2'-O-Methyl-adenosine
  modified_base 78: mod_base = OTHER; note = 2'-O-Methyl-adenosine
  modified_base 79: mod_base = OTHER; note = 2'-O-Methyl-guanosine
  modified_base 80: mod_base = OTHER; note = 2'-O-Methyl-uridine
  modified_base 82: mod_base = OTHER; note = 2'-O-Methyl-guanosine
  modified_base 83: mod_base = OTHER; note = 2'-O-Methyl-cytidine
  modified_base 84: mod_base = OTHER; note = 2'-O-Methyl-adenosine
  modified_base 85: mod_base = OTHER; note = 2'-O-Methyl-cytidine
  modified_base 86: mod_base = OTHER; note = 2'-O-Methyl-cytidine
  modified_base 87: mod_base = OTHER; note = 2'-O-Methyl-guanosine
  modified_base 89: mod_base = OTHER; note = 2'-O-Methyl-guanosine
  modified_base 91: mod_base = OTHER; note = 2'-O-Methyl-cytidine
  modified_base 92: mod_base = OTHER; note = 2'-O-Methyl-guanosine
  modified_base 93: mod_base = OTHER; note = 2'-O-Methyl-guanosine
  modified_base 94: mod_base = OTHER; note = 2'-O-Methyl-uridine
  modified_base 95: mod_base = OTHER; note = 2'-O-Methyl-guanosine
  modified_base 96: mod_base = OTHER; note = 2'-O-Methyl-cytidine
  modified_base 97: mod_base = OTHER; note = 2'-O-Methyl-uridine phosphorothioate
  modified_base 98: mod_base = OTHER; note = 2'-O-Methyl-uridine phosphorothioate
  modified_base 99: mod_base = OTHER; note = 2'-O-Methyl-uridine phosphorothioate
  modified_base 100: mod_base = OTHER; note = 2'-O-Methyl-uridine
  misc_difference 101: note = a, c, g, inosine, u, deoxyadenosine, deoxyguanosine, deoxycytidine, deoxyinosine, thymine, ribonebularine, 2'-O-methylnebularine, or 2'-deoxynebularine
  misc_difference 102: note = a, c, g, inosine, u, deoxyadenosine, deoxyguanosine, deoxycytidine, deoxyinosine, thymine, ribonebularine, 2'-O-methylnebularine, or 2'-deoxynebularine
  misc_difference 103: note = a, c, g, inosine, u, deoxyadenosine, deoxyguanosine, deoxycytidine, deoxyinosine, thymine, ribonebularine, 2'-O-methylnebularine, or 2'-deoxynebularine

SEQ ID NO: 2791 - RNA, 103 nt, synthetic construct; identical to SEQ ID NO: 1797
  source 1..103: mol_type = other RNA
  modified_base 1: mod_base = OTHER; note = 2'-O-Methyl-cytidine phosphorothioate
  modified_base 2: mod_base = OTHER; note = 2'-O-Methyl-adenosine phosphorothioate
  modified_base 3: mod_base = OTHER; note = 2'-O-Methyl-guanosine phosphorothioate
  modified_base 21: mod_base = OTHER; note = 2'-O-Methyl-guanosine
  modified_base 28: mod_base = OTHER; note = 2'-O-Methyl-adenosine
  modified_base 29: mod_base = OTHER; note = 2'-O-Methyl-guanosine
  modified_base 30: mod_base = OTHER; note = 2'-O-Methyl-cytidine
  modified_base 31: mod_base = OTHER; note = 2'-O-Methyl-uridine
  modified_base 32: mod_base = OTHER; note = 2'-O-Methyl-adenosine
  modified_base 34: mod_base = OTHER; note = 2'-O-Methyl-adenosine
  modified_base 35: mod_base = OTHER; note = 2'-O-Methyl-adenosine
  modified_base 36: mod_base = OTHER; note = 2'-O-Methyl-adenosine
  modified_base 37: mod_base = OTHER; note = 2'-O-Methyl-uridine
  modified_base 38: mod_base = OTHER; note = 2'-O-Methyl-adenosine
  modified_base 39: mod_base = OTHER; note = 2'-O-Methyl-guanosine
  modified_base 40: mod_base = OTHER; note = 2'-O-Methyl-cytidine
  modified_base 41: mod_base = OTHER; note = 2'-O-Methyl-adenosine
  modified_base 42: mod_base = OTHER; note = 2'-O-Methyl-adenosine
  modified_base 45: mod_base = OTHER; note = uridine phosphorothioate
  modified_base 46: mod_base = OTHER; note = 2'-O-Methyl-adenosine
  modified_base 48: mod_base = OTHER; note = 2'-O-Methyl-adenosine
  modified_base 50: mod_base = OTHER; note = 2'-O-Methyl-uridine
  modified_base 52: mod_base = OTHER; note = 2'-O-Methyl-adenosine
  modified_base 53: mod_base = OTHER; note = 2'-O-Methyl-guanosine
  modified_base 54: mod_base = OTHER; note = 2'-O-Methyl-guanosine
  modified_base 55: mod_base = OTHER; note = 2'-O-Methyl-cytidine
  modified_base 56: mod_base = OTHER; note = 2'-O-Methyl-uridine
  modified_base 57: mod_base = OTHER; note = 2'-O-Methyl-adenosine
  modified_base 60: mod_base = OTHER; note = 2'-O-Methyl-cytidine
  modified_base 61: mod_base = OTHER; note = 2'-O-Methyl-cytidine
  modified_base 66: mod_base = OTHER; note = 2'-O-Methyl-uridine
  modified_base 67: mod_base = OTHER; note = 2'-O-Methyl-cytidine
  modified_base 70: mod_base = OTHER; note = 2'-O-Methyl-cytidine
  modified_base 71: mod_base = OTHER; note = 2'-O-Methyl-uridine
  modified_base 72: mod_base = OTHER; note = 2'-O-Methyl-uridine
  modified_base 74: mod_base = OTHER; note = 2'-O-Methyl-adenosine
  modified_base 75: mod_base = OTHER; note = 2'-O-Methyl-adenosine
  modified_base 76: mod_base = OTHER; note = 2'-O-Methyl-adenosine
  modified_base 77: mod_base = OTHER; note = 2'-O-Methyl-adenosine
  modified_base 78: mod_base = OTHER; note = 2'-O-Methyl-adenosine
  modified_base 79: mod_base = OTHER; note = 2'-O-Methyl-guanosine
  modified_base 80: mod_base = OTHER; note = 2'-O-Methyl-uridine
  modified_base 82: mod_base = OTHER; note = 2'-O-Methyl-guanosine
  modified_base 83: mod_base = OTHER; note = 2'-O-Methyl-cytidine
  modified_base 84: mod_base = OTHER; note = 2'-O-Methyl-adenosine
  modified_base 85: mod_base = OTHER; note = 2'-O-Methyl-cytidine
  modified_base 86: mod_base = OTHER; note = 2'-O-Methyl-cytidine
  modified_base 87: mod_base = OTHER; note = 2'-O-Methyl-guanosine
  modified_base 89: mod_base = OTHER; note = 2'-O-Methyl-guanosine
  modified_base 92: mod_base = OTHER; note = 2'-O-Methyl-guanosine
  modified_base 93: mod_base = OTHER; note = 2'-O-Methyl-guanosine
  modified_base 94: mod_base = OTHER; note = 2'-O-Methyl-uridine
  modified_base 95: mod_base = OTHER; note = 2'-O-Methyl-guanosine
  modified_base 96: mod_base = OTHER; note = 2'-O-Methyl-cytidine
  modified_base 97: mod_base = OTHER; note = 2'-O-Methyl-uridine phosphorothioate
  modified_base 98: mod_base = OTHER; note = 2'-O-Methyl-uridine phosphorothioate
  modified_base 99: mod_base = OTHER; note = 2'-O-Methyl-uridine phosphorothioate
  modified_base 100: mod_base = OTHER; note = 2'-O-Methyl-uridine
  misc_difference 101: note = a, c, g, inosine, u, deoxyadenosine, deoxyguanosine, deoxycytidine, deoxyinosine, thymine, ribonebularine, 2'-O-methylnebularine, or 2'-deoxynebularine
  misc_difference 102: note = a, c, g, inosine, u, deoxyadenosine, deoxyguanosine, deoxycytidine, deoxyinosine, thymine, ribonebularine, 2'-O-methylnebularine, or 2'-deoxynebularine
  misc_difference 103: note = a, c, g, inosine, u, deoxyadenosine, deoxyguanosine, deoxycytidine, deoxyinosine, thymine, ribonebularine, 2'-O-methylnebularine, or 2'-deoxynebularine

SEQ ID NO: 2792 - RNA, 103 nt, synthetic construct; identical to SEQ ID NO: 1795
  source 1..103: mol_type = other RNA
  modified_base 1: mod_base = OTHER; note = 2'-O-Methyl-cytidine phosphorothioate
  modified_base 2: mod_base = OTHER; note = 2'-O-Methyl-cytidine phosphorothioate
  modified_base 3: mod_base = OTHER; note = 2'-O-Methyl-cytidine phosphorothioate
  modified_base 21: mod_base = OTHER; note = 2'-O-Methyl-guanosine
  modified_base 25: mod_base = OTHER; note = uridine phosphorothioate
  modified_base 28: mod_base = OTHER; note = 2'-O-Methyl-adenosine
  modified_base 29: mod_base = OTHER; note = 2'-O-Methyl-guanosine
  modified_base 30: mod_base = OTHER; note = 2'-O-Methyl-cytidine
  modified_base 31: mod_base = OTHER; note = 2'-O-Methyl-uridine
  modified_base 32: mod_base = OTHER; note = 2'-O-Methyl-adenosine
  modified_base 33: mod_base = OTHER; note = 2'-O-Methyl-guanosine
  modified_base 34: mod_base = OTHER; note = 2'-O-Methyl-adenosine
  modified_base 35: mod_base = OTHER; note = 2'-O-Methyl-adenosine
  modified_base 36: mod_base = OTHER; note = 2'-O-Methyl-adenosine
  modified_base 37: mod_base = OTHER; note = 2'-O-Methyl-uridine
  modified_base 38: mod_base = OTHER; note = 2'-O-Methyl-adenosine
  modified_base 39: mod_base = OTHER; note = 2'-O-Methyl-guanosine
  modified_base 40: mod_base = OTHER; note = 2'-O-Methyl-cytidine
  modified_base 41: mod_base = OTHER; note = 2'-O-Methyl-adenosine
  modified_base 42: mod_base = OTHER; note = 2'-O-Methyl-adenosine
  modified_base 46: mod_base = OTHER; note = 2'-O-Methyl-adenosine
  modified_base 48: mod_base = OTHER; note = 2'-O-Methyl-adenosine
  modified_base 50: mod_base = OTHER; note = 2'-O-Methyl-uridine
  modified_base 52: mod_base = OTHER; note = 2'-O-Methyl-adenosine
  modified_base 53: mod_base = OTHER; note = 2'-O-Methyl-guanosine
  modified_base 54: mod_base = OTHER; note = 2'-O-Methyl-guanosine
  modified_base 55: mod_base = OTHER; note = 2'-O-Methyl-cytidine
  modified_base 56: mod_base = OTHER; note = 2'-O-Methyl-uridine
  modified_base 57: mod_base = OTHER; note = 2'-O-Methyl-adenosine
  modified_base 60: mod_base = OTHER; note = 2'-O-Methyl-cytidine
  modified_base 61: mod_base = OTHER; note = 2'-O-Methyl-cytidine
  modified_base 66: mod_base = OTHER; note = 2'-O-Methyl-uridine
  modified_base 67: mod_base = OTHER; note = 2'-O-Methyl-cytidine
  modified_base 70: mod_base = OTHER; note = 2'-O-Methyl-cytidine
  modified_base 71: mod_base = OTHER; note = 2'-O-Methyl-uridine
  modified_base 72: mod_base = OTHER; note = 2'-O-Methyl-uridine
  modified_base 73: mod_base = OTHER; note = 2'-O-Methyl-guanosine
  modified_base 74: mod_base = OTHER; note = 2'-O-Methyl-adenosine
  modified_base 75: mod_base = OTHER; note = 2'-O-Methyl-adenosine
  modified_base 76: mod_base = OTHER; note = 2'-O-Methyl-adenosine
  modified_base 77: mod_base = OTHER; note = 2'-O-Methyl-adenosine
  modified_base 78: mod_base = OTHER; note = 2'-O-Methyl-adenosine
  modified_base 79: mod_base = OTHER; note = 2'-O-Methyl-guanosine
  modified_base 80: mod_base = OTHER; note = 2'-O-Methyl-uridine
  modified_base 81: mod_base = OTHER; note = 2'-O-Methyl-guanosine
  modified_base 83: mod_base = OTHER; note = 2'-O-Methyl-cytidine
  modified_base 84: mod_base = OTHER; note = 2'-O-Methyl-adenosine
  modified_base 85: mod_base = OTHER; note = 2'-O-Methyl-cytidine
  modified_base 86: mod_base = OTHER; note = 2'-O-Methyl-cytidine
  modified_base 87: mod_base = OTHER; note = 2'-O-Methyl-guanosine
  modified_base 88: mod_base = OTHER; note = 2'-O-Methyl-adenosine
  modified_base 89: mod_base = OTHER; note = 2'-O-Methyl-guanosine
  modified_base 90: mod_base = OTHER; note = 2'-O-Methyl-uridine
  modified_base 91: mod_base = OTHER; note = 2'-O-Methyl-cytidine
  modified_base 92: mod_base = OTHER; note = 2'-O-Methyl-guanosine
  modified_base 93: mod_base = OTHER; note = 2'-O-Methyl-guanosine
  modified_base 94: mod_base = OTHER; note = 2'-O-Methyl-uridine
  modified_base 95: mod_base = OTHER; note = 2'-O-Methyl-guanosine
  modified_base 96: mod_base = OTHER; note = 2'-O-Methyl-cytidine
  modified_base 97: mod_base = OTHER; note = 2'-O-Methyl-uridine phosphorothioate
  modified_base 98: mod_base = OTHER; note = 2'-O-Methyl-uridine phosphorothioate
  modified_base 99: mod_base = OTHER; note = 2'-O-Methyl-uridine phosphorothioate
  modified_base 100: mod_base = OTHER; note = 2'-O-Methyl-uridine
  misc_difference 101: note = a, c, g, inosine, u, deoxyadenosine, deoxyguanosine, deoxycytidine, deoxyinosine, thymine, ribonebularine, 2'-O-methylnebularine, or 2'-deoxynebularine
  misc_difference 102: note = a, c, g, inosine, u, deoxyadenosine, deoxyguanosine, deoxycytidine, deoxyinosine, thymine, ribonebularine, 2'-O-methylnebularine, or 2'-deoxynebularine
  misc_difference 103: note = a, c, g, inosine, u, deoxyadenosine, deoxyguanosine, deoxycytidine, deoxyinosine, thymine, ribonebularine, 2'-O-methylnebularine, or 2'-deoxynebularine

SEQ ID NO: 2793 - RNA, 103 nt, synthetic construct; identical to SEQ ID NO: 1795
  source 1..103: mol_type = other RNA
  modified_base 1: mod_base = OTHER; note = 2'-O-Methyl-cytidine phosphorothioate
  modified_base 2: mod_base = OTHER; note = 2'-O-Methyl-cytidine phosphorothioate
  modified_base 3: mod_base = OTHER; note = 2'-O-Methyl-cytidine phosphorothioate
  modified_base 21: mod_base = OTHER; note = 2'-O-Methyl-guanosine
  modified_base 25: mod_base = OTHER; note = uridine phosphorothioate
  modified_base 28: mod_base = OTHER; note = 2'-O-Methyl-adenosine
  modified_base 29: mod_base = OTHER; note = 2'-O-Methyl-guanosine
  modified_base 30: mod_base = OTHER; note = 2'-O-Methyl-cytidine
  modified_base 31: mod_base = OTHER; note = 2'-O-Methyl-uridine
  modified_base 32: mod_base = OTHER; note = 2'-O-Methyl-adenosine
  modified_base 34: mod_base = OTHER; note = 2'-O-Methyl-adenosine
  modified_base 35: mod_base = OTHER; note = 2'-O-Methyl-adenosine
  modified_base 36: mod_base = OTHER; note = 2'-O-Methyl-adenosine
  modified_base 37: mod_base = OTHER; note = 2'-O-Methyl-uridine
  modified_base 38: mod_base = OTHER; note = 2'-O-Methyl-adenosine
  modified_base 39: mod_base = OTHER; note = 2'-O-Methyl-guanosine
  modified_base 40: mod_base = OTHER; note = 2'-O-Methyl-cytidine
  modified_base 41: mod_base = OTHER; note = 2'-O-Methyl-adenosine
  modified_base 42: mod_base = OTHER; note = 2'-O-Methyl-adenosine
  modified_base 46: mod_base = OTHER; note = 2'-O-Methyl-adenosine
  modified_base 48: mod_base = OTHER; note = 2'-O-Methyl-adenosine
  modified_base 50: mod_base = OTHER; note = 2'-O-Methyl-uridine
  modified_base 52: mod_base = OTHER; note = 2'-O-Methyl-adenosine
  modified_base 53: mod_base = OTHER; note = 2'-O-Methyl-guanosine
  modified_base 54: mod_base = OTHER; note = 2'-O-Methyl-guanosine
  modified_base 55: mod_base = OTHER; note = 2'-O-Methyl-cytidine
  modified_base 56: mod_base = OTHER; note = 2'-O-Methyl-uridine
  modified_base 57: mod_base = OTHER; note = 2'-O-Methyl-adenosine
  modified_base 60: mod_base = OTHER; note = 2'-O-Methyl-cytidine
  modified_base 61: mod_base = OTHER; note = 2'-O-Methyl-cytidine
  modified_base 66: mod_base = OTHER; note = 2'-O-Methyl-uridine
  modified_base 67: mod_base = OTHER; note = 2'-O-Methyl-cytidine
  modified_base 70: mod_base = OTHER; note = 2'-O-Methyl-cytidine
  modified_base 71: mod_base = OTHER; note = 2'-O-Methyl-uridine
  modified_base 72: mod_base = OTHER; note = 2'-O-Methyl-uridine
  modified_base 74: mod_base = OTHER; note = 2'-O-Methyl-adenosine
  modified_base 75: mod_base = OTHER; note = 2'-O-Methyl-adenosine
  modified_base 76: mod_base = OTHER; note = 2'-O-Methyl-adenosine
  modified_base 77: mod_base = OTHER; note = 2'-O-Methyl-adenosine
  modified_base 78: mod_base = OTHER; note = 2'-O-Methyl-adenosine
  modified_base 79: mod_base = OTHER; note = 2'-O-Methyl-guanosine
  modified_base 80: mod_base = OTHER; note = 2'-O-Methyl-uridine
  modified_base 81: mod_base = OTHER; note = 2'-O-Methyl-guanosine
  modified_base 83: mod_base = OTHER; note = 2'-O-Methyl-cytidine
  modified_base 84: mod_base = OTHER; note = 2'-O-Methyl-adenosine
  modified_base 85: mod_base = OTHER; note = 2'-O-Methyl-cytidine
  modified_base 86: mod_base = OTHER; note = 2'-O-Methyl-cytidine
  modified_base 87: mod_base = OTHER; note = 2'-O-Methyl-guanosine
  modified_base 88: mod_base = OTHER; note = 2'-O-Methyl-adenosine
  modified_base 89: mod_base = OTHER; note = 2'-O-Methyl-guanosine
  modified_base 90: mod_base = OTHER; note = 2'-O-Methyl-uridine
  modified_base 91: mod_base = OTHER; note = 2'-O-Methyl-cytidine
  modified_base 92: mod_base = OTHER; note = 2'-O-Methyl-guanosine
  modified_base 93: mod_base = OTHER; note = 2'-O-Methyl-guanosine
  modified_base 94: mod_base = OTHER; note = 2'-O-Methyl-uridine
  modified_base 95: mod_base = OTHER; note = 2'-O-Methyl-guanosine
  modified_base 96: mod_base = OTHER; note = 2'-O-Methyl-cytidine
  modified_base 97: mod_base = OTHER; note = 2'-O-Methyl-uridine phosphorothioate
  modified_base 98: mod_base = OTHER; note = 2'-O-Methyl-uridine phosphorothioate
  modified_base 99: mod_base = OTHER; note = 2'-O-Methyl-uridine phosphorothioate
  modified_base 100: mod_base = OTHER; note = 2'-O-Methyl-uridine
  misc_difference 101: note = a, c, g, inosine, u, deoxyadenosine, deoxyguanosine, deoxycytidine, deoxyinosine, thymine, ribonebularine, 2'-O-methylnebularine, or 2'-deoxynebularine
  misc_difference 102: note = a, c, g, inosine, u, deoxyadenosine, deoxyguanosine, deoxycytidine, deoxyinosine, thymine, ribonebularine, 2'-O-methylnebularine, or 2'-deoxynebularine
  misc_difference 103: note = a, c, g, inosine, u, deoxyadenosine, deoxyguanosine, deoxycytidine, deoxyinosine, thymine, ribonebularine, 2'-O-methylnebularine, or 2'-deoxynebularine

SEQ ID NO: 2794 - RNA, 103 nt, synthetic construct; identical to SEQ ID NO: 1796
  source 1..103: mol_type = other RNA
  modified_base 1: mod_base = OTHER; note = 2'-O-Methyl-guanosine phosphorothioate
  modified_base 2: mod_base = OTHER; note = 2'-O-Methyl-adenosine phosphorothioate
  modified_base 3: mod_base = OTHER; note = 2'-O-Methyl-guanosine phosphorothioate
  modified_base 21: mod_base = OTHER; note = 2'-O-Methyl-guanosine
  modified_base 25: mod_base = OTHER; note = uridine phosphorothioate
  modified_base 28: mod_base = OTHER; note = 2'-O-Methyl-adenosine
  modified_base 29: mod_base = OTHER; note = 2'-O-Methyl-guanosine
  modified_base 30: mod_base = OTHER; note = 2'-O-Methyl-cytidine
  modified_base 31: mod_base = OTHER; note = 2'-O-Methyl-uridine
  modified_base 32: mod_base = OTHER; note = 2'-O-Methyl-adenosine
  modified_base 33: mod_base = OTHER; note = 2'-O-Methyl-guanosine
  modified_base 34: mod_base = OTHER; note = 2'-O-Methyl-adenosine
  modified_base 35: mod_base = OTHER; note = 2'-O-Methyl-adenosine
  modified_base 36: mod_base = OTHER; note = 2'-O-Methyl-adenosine
  modified_base 37: mod_base = OTHER; note = 2'-O-Methyl-uridine
  modified_base 38: mod_base = OTHER; note = 2'-O-Methyl-adenosine
  modified_base 39: mod_base = OTHER; note = 2'-O-Methyl-guanosine
  modified_base 40: mod_base = OTHER; note = 2'-O-Methyl-cytidine
  modified_base 41: mod_base = OTHER; note = 2'-O-Methyl-adenosine
  modified_base 42: mod_base = OTHER; note = 2'-O-Methyl-adenosine
  modified_base 46: mod_base = OTHER; note = 2'-O-Methyl-adenosine
  modified_base 48: mod_base = OTHER; note = 2'-O-Methyl-adenosine
  modified_base 50: mod_base = OTHER; note = 2'-O-Methyl-uridine
  modified_base 52: mod_base = OTHER; note = 2'-O-Methyl-adenosine
  modified_base 53: mod_base = OTHER; note = 2'-O-Methyl-guanosine
  modified_base 54: mod_base = OTHER; note = 2'-O-Methyl-guanosine
  modified_base 55: mod_base = OTHER; note = 2'-O-Methyl-cytidine
  modified_base 56: mod_base = OTHER; note = 2'-O-Methyl-uridine
  modified_base 57: mod_base = OTHER; note = 2'-O-Methyl-adenosine
  modified_base 60: mod_base = OTHER; note = 2'-O-Methyl-cytidine
  modified_base 61: mod_base = OTHER; note = 2'-O-Methyl-cytidine
  modified_base 66: mod_base = OTHER; note = 2'-O-Methyl-uridine
  modified_base 67: mod_base = OTHER; note = 2'-O-Methyl-cytidine
  modified_base 70: mod_base = OTHER; note = 2'-O-Methyl-cytidine
  modified_base 71: mod_base = OTHER; note = 2'-O-Methyl-uridine
  modified_base 72: mod_base = OTHER; note = 2'-O-Methyl-uridine
  modified_base 73: mod_base = OTHER; note = 2'-O-Methyl-guanosine
  modified_base 74: mod_base = OTHER; note = 2'-O-Methyl-adenosine
  modified_base 75: mod_base = OTHER; note = 2'-O-Methyl-adenosine
  modified_base 76: mod_base = OTHER; note = 2'-O-Methyl-adenosine
  modified_base 77: mod_base = OTHER; note = 2'-O-Methyl-adenosine
  modified_base 78: mod_base = OTHER; note = 2'-O-Methyl-adenosine
  modified_base 79: mod_base = OTHER; note = 2'-O-Methyl-guanosine
  modified_base 80: mod_base = OTHER; note = 2'-O-Methyl-uridine
  modified_base 81: mod_base = OTHER; note = 2'-O-Methyl-guanosine
  modified_base 83: mod_base = OTHER; note = 2'-O-Methyl-cytidine
  modified_base 84: mod_base = OTHER; note = 2'-O-Methyl-adenosine
  modified_base 85: mod_base = OTHER; note = 2'-O-Methyl-cytidine
  modified_base 86: mod_base = OTHER; note = 2'-O-Methyl-cytidine
  modified_base 87: mod_base = OTHER; note = 2'-O-Methyl-guanosine
  modified_base 88: mod_base = OTHER; note = 2'-O-Methyl-adenosine
  modified_base 89: mod_base = OTHER; note = 2'-O-Methyl-guanosine
  modified_base 90: mod_base = OTHER; note = 2'-O-Methyl-uridine
  modified_base 91: mod_base = OTHER; note = 2'-O-Methyl-cytidine
  modified_base 92: mod_base = OTHER; note = 2'-O-Methyl-guanosine
  modified_base 93: mod_base = OTHER; note = 2'-O-Methyl-guanosine
  modified_base 94: mod_base = OTHER; note = 2'-O-Methyl-uridine
  modified_base 95: mod_base = OTHER; note = 2'-O-Methyl-guanosine
  modified_base 96: mod_base = OTHER; note = 2'-O-Methyl-cytidine
  modified_base 97: mod_base = OTHER; note = 2'-O-Methyl-uridine phosphorothioate
  modified_base 98: mod_base = OTHER; note = 2'-O-Methyl-uridine phosphorothioate
  modified_base 99: mod_base = OTHER; note = 2'-O-Methyl-uridine phosphorothioate
  modified_base 100: mod_base = OTHER; note = 2'-O-Methyl-uridine
  misc_difference 101: note = a, c, g, inosine, u, deoxyadenosine, deoxyguanosine, deoxycytidine, deoxyinosine, thymine, ribonebularine, 2'-O-methylnebularine, or 2'-deoxynebularine
  misc_difference 102: note = a, c, g, inosine, u, deoxyadenosine, deoxyguanosine, deoxycytidine, deoxyinosine, thymine, ribonebularine, 2'-O-methylnebularine, or 2'-deoxynebularine
  misc_difference 103: note = a, c, g, inosine, u, deoxyadenosine, deoxyguanosine, deoxycytidine, deoxyinosine, thymine, ribonebularine, 2'-O-methylnebularine, or 2'-deoxynebularine

SEQ ID NO: 2795 - RNA, 103 nt, synthetic construct; identical to SEQ ID NO: 1796
  source 1..103: mol_type = other RNA
  modified_base 1: mod_base = OTHER; note = 2'-O-Methyl-guanosine phosphorothioate
  modified_base 2: mod_base = OTHER; note = 2'-O-Methyl-adenosine phosphorothioate
  modified_base 3: mod_base = OTHER; note = 2'-O-Methyl-guanosine phosphorothioate
  modified_base 21: mod_base = OTHER; note = 2'-O-Methyl-guanosine
  modified_base 25: mod_base = OTHER; note = uridine phosphorothioate
  modified_base 28: mod_base = OTHER; note = 2'-O-Methyl-adenosine
  modified_base 29: mod_base = OTHER; note = 2'-O-Methyl-guanosine
  modified_base 30: mod_base = OTHER; note = 2'-O-Methyl-cytidine
  modified_base 31: mod_base = OTHER; note = 2'-O-Methyl-uridine
  modified_base 32: mod_base = OTHER; note = 2'-O-Methyl-adenosine
  modified_base 34: mod_base = OTHER; note = 2'-O-Methyl-adenosine
  modified_base 35: mod_base = OTHER; note = 2'-O-Methyl-adenosine
  modified_base 36: mod_base = OTHER; note = 2'-O-Methyl-adenosine
  modified_base 37: mod_base = OTHER; note = 2'-O-Methyl-uridine
  modified_base 38: mod_base = OTHER; note = 2'-O-Methyl-adenosine
  modified_base 39: mod_base = OTHER; note = 2'-O-Methyl-guanosine
  modified_base 40: mod_base = OTHER; note = 2'-O-Methyl-cytidine
  modified_base 41: mod_base = OTHER; note = 2'-O-Methyl-adenosine
  modified_base 42: mod_base = OTHER; note = 2'-O-Methyl-adenosine
  modified_base 46: mod_base = OTHER; note = 2'-O-Methyl-adenosine
  modified_base 48: mod_base = OTHER; note = 2'-O-Methyl-adenosine
  modified_base 50: mod_base = OTHER; note = 2'-O-Methyl-uridine
  modified_base 52: mod_base = OTHER; note = 2'-O-Methyl-adenosine
  modified_base 53: mod_base = OTHER; note = 2'-O-Methyl-guanosine
  modified_base 54: mod_base = OTHER; note = 2'-O-Methyl-guanosine
  modified_base 55: mod_base = OTHER; note = 2'-O-Methyl-cytidine
  modified_base 56: mod_base = OTHER; note = 2'-O-Methyl-uridine
  modified_base 57: mod_base = OTHER; note = 2'-O-Methyl-adenosine
  modified_base 60: mod_base = OTHER; note = 2'-O-Methyl-cytidine
  modified_base 61: mod_base = OTHER; note = 2'-O-Methyl-cytidine
  modified_base 66: mod_base = OTHER; note = 2'-O-Methyl-uridine
  modified_base 67: mod_base = OTHER; note = 2'-O-Methyl-cytidine
  modified_base 70: mod_base = OTHER; note = 2'-O-Methyl-cytidine
  modified_base 71: mod_base = OTHER; note = 2'-O-Methyl-uridine
  modified_base 72: mod_base = OTHER; note = 2'-O-Methyl-uridine
  modified_base 74: mod_base = OTHER; note = 2'-O-Methyl-adenosine
  modified_base 75: mod_base = OTHER; note = 2'-O-Methyl-adenosine
  modified_base 76: mod_base = OTHER; note = 2'-O-Methyl-adenosine
  modified_base 77: mod_base = OTHER; note = 2'-O-Methyl-adenosine
  modified_base 78: mod_base = OTHER; note = 2'-O-Methyl-adenosine
  modified_base 79: mod_base = OTHER; note = 2'-O-Methyl-guanosine
  modified_base 80: mod_base = OTHER; note = 2'-O-Methyl-uridine
  modified_base 81: mod_base = OTHER; note = 2'-O-Methyl-guanosine
  modified_base 83: mod_base = OTHER; note = 2'-O-Methyl-cytidine
  modified_base 84: mod_base = OTHER; note = 2'-O-Methyl-adenosine
  modified_base 85: mod_base = OTHER; note = 2'-O-Methyl-cytidine
  modified_base 86: mod_base = OTHER; note = 2'-O-Methyl-cytidine
  modified_base 87: mod_base = OTHER; note = 2'-O-Methyl-guanosine
  modified_base 88: mod_base = OTHER; note = 2'-O-Methyl-adenosine
  modified_base 89: mod_base = OTHER; note = 2'-O-Methyl-guanosine
  modified_base 90: mod_base = OTHER; note = 2'-O-Methyl-uridine
  modified_base 91: mod_base = OTHER; note = 2'-O-Methyl-cytidine
  modified_base 92: mod_base = OTHER; note = 2'-O-Methyl-guanosine
  modified_base 93: mod_base = OTHER; note = 2'-O-Methyl-guanosine
  modified_base 94: mod_base = OTHER; note = 2'-O-Methyl-uridine
  modified_base 95: mod_base = OTHER; note = 2'-O-Methyl-guanosine
  modified_base 96: mod_base = OTHER; note = 2'-O-Methyl-cytidine
  modified_base 97: mod_base = OTHER; note = 2'-O-Methyl-uridine phosphorothioate
  modified_base 98: mod_base = OTHER; note = 2'-O-Methyl-uridine phosphorothioate
  modified_base 99: mod_base = OTHER; note = 2'-O-Methyl-uridine phosphorothioate
  modified_base 100: mod_base = OTHER; note = 2'-O-Methyl-uridine
  misc_difference 101: note = a, c, g, inosine, u, deoxyadenosine, deoxyguanosine, deoxycytidine, deoxyinosine, thymine, ribonebularine, 2'-O-methylnebularine, or 2'-deoxynebularine
  misc_difference 102: note = a, c, g, inosine, u, deoxyadenosine, deoxyguanosine, deoxycytidine, deoxyinosine, thymine, ribonebularine, 2'-O-methylnebularine, or 2'-deoxynebularine
  misc_difference 103: note = a, c, g, inosine, u, deoxyadenosine, deoxyguanosine, deoxycytidine, deoxyinosine, thymine, ribonebularine, 2'-O-methylnebularine, or 2'-deoxynebularine

SEQ ID NO: 2796 - RNA, 103 nt, synthetic construct; identical to SEQ ID NO: 1797
  source 1..103: mol_type = other RNA
  modified_base 1: mod_base = OTHER; note = 2'-O-Methyl-cytidine phosphorothioate
  modified_base 2: mod_base = OTHER; note = 2'-O-Methyl-adenosine phosphorothioate
  modified_base 3: mod_base = OTHER; note = 2'-O-Methyl-guanosine phosphorothioate
  modified_base 21: mod_base = OTHER; note = 2'-O-Methyl-guanosine
  modified_base 25: mod_base = OTHER; note = uridine phosphorothioate
  modified_base 28: mod_base = OTHER; note = 2'-O-Methyl-adenosine
  modified_base 29: mod_base = OTHER; note = 2'-O-Methyl-guanosine
  modified_base 30: mod_base = OTHER; note = 2'-O-Methyl-cytidine
  modified_base 31: mod_base = OTHER; note = 2'-O-Methyl-uridine
  modified_base 32: mod_base = OTHER; note = 2'-O-Methyl-adenosine
  modified_base 33: mod_base = OTHER; note = 2'-O-Methyl-guanosine
  modified_base 34: mod_base = OTHER; note = 2'-O-Methyl-adenosine
  modified_base 35: mod_base = OTHER; note = 2'-O-Methyl-adenosine
  modified_base 36: mod_base = OTHER; note = 2'-O-Methyl-adenosine
  modified_base 37: mod_base = OTHER; note = 2'-O-Methyl-uridine
  modified_base 38: mod_base = OTHER; note = 2'-O-Methyl-adenosine
  modified_base 39: mod_base = OTHER; note = 2'-O-Methyl-guanosine
  modified_base 40: mod_base = OTHER; note = 2'-O-Methyl-cytidine
  modified_base 41: mod_base = OTHER; note = 2'-O-Methyl-adenosine
  modified_base 42: mod_base = OTHER; note = 2'-O-Methyl-adenosine
  modified_base 46: mod_base = OTHER; note = 2'-O-Methyl-adenosine
  modified_base 48: mod_base = OTHER; note = 2'-O-Methyl-adenosine
  modified_base 50: mod_base = OTHER; note = 2'-O-Methyl-uridine
  modified_base 52: mod_base = OTHER; note = 2'-O-Methyl-adenosine
  modified_base 53: mod_base = OTHER; note = 2'-O-Methyl-guanosine
  modified_base 54: mod_base = OTHER; note = 2'-O-Methyl-guanosine
  modified_base 57: mod_base = OTHER; note = 2'-O-Methyl-adenosine
  modified_base 61: mod_base = OTHER; note = 2'-O-Methyl-cytidine
  modified_base 66: mod_base = OTHER; note = 2'-O-Methyl-uridine
  modified_base 67: mod_base = OTHER; note = 2'-O-Methyl-cytidine
  modified_base 70: mod_base = OTHER; note = 2'-O-Methyl-cytidine
  modified_base 71: mod_base = OTHER; note = 2'-O-Methyl-uridine
  modified_base 72: mod_base = OTHER; note = 2'-O-Methyl-uridine
  modified_base 74: mod_base = OTHER; note = 2'-O-Methyl-adenosine
  modified_base 75: mod_base = OTHER; note = 2'-O-Methyl-adenosine
  modified_base 76: mod_base = OTHER; note = 2'-O-Methyl-adenosine
  modified_base 77: mod_base = OTHER; note = 2'-O-Methyl-adenosine
  modified_base 78: mod_base = OTHER; note = 2'-O-Methyl-adenosine
  modified_base 79: mod_base = OTHER; note = 2'-O-Methyl-guanosine
  modified_base 80: mod_base = OTHER; note = 2'-O-Methyl-uridine
  modified_base 82: mod_base = OTHER; note = 2'-O-Methyl-guanosine
  modified_base 83: mod_base = OTHER; note = 2'-O-Methyl-cytidine
  modified_base 84: mod_base = OTHER; note = 2'-O-Methyl-adenosine
  modified_base 85: mod_base = OTHER; note = 2'-O-Methyl-cytidine
  modified_base 86: mod_base = OTHER; note = 2'-O-Methyl-cytidine
  modified_base 87: mod_base = OTHER; note = 2'-O-Methyl-guanosine
  modified_base 89: mod_base = OTHER; note = 2'-O-Methyl-guanosine
  modified_base 92: mod_base = OTHER; note = 2'-O-Methyl-guanosine
  modified_base 93: mod_base = OTHER; note = 2'-O-Methyl-guanosine
  modified_base 94: mod_base = OTHER; note = 2'-O-Methyl-uridine
  modified_base 95: mod_base = OTHER; note = 2'-O-Methyl-guanosine
  modified_base 96: mod_base = OTHER; note = 2'-O-Methyl-cytidine
  modified_base 97: mod_base = OTHER; note = 2'-O-Methyl-uridine phosphorothioate
  modified_base 98: mod_base = OTHER; note = 2'-O-Methyl-uridine phosphorothioate
  modified_base 99: mod_base = OTHER; note = 2'-O-Methyl-uridine phosphorothioate
  modified_base 100: mod_base = OTHER; note = 2'-O-Methyl-uridine
  misc_difference 101: note = a, c, g, inosine, u, deoxyadenosine, deoxyguanosine, deoxycytidine, deoxyinosine, thymine, ribonebularine, 2'-O-methylnebularine, or 2'-deoxynebularine
  misc_difference 102: note = a, c, g, inosine, u, deoxyadenosine, deoxyguanosine, deoxycytidine, deoxyinosine, thymine, ribonebularine, 2'-O-methylnebularine, or 2'-deoxynebularine
  misc_difference 103: note = a, c, g, inosine, u, deoxyadenosine, deoxyguanosine, deoxycytidine, deoxyinosine, thymine, ribonebularine, 2'-O-methylnebularine, or 2'-deoxynebularine

SEQ ID NO: 2797 - RNA, 103 nt, synthetic construct; identical to SEQ ID NO: 1797
  source 1..103: mol_type = other RNA
  modified_base 1: mod_base = OTHER; note = 2'-O-Methyl-cytidine phosphorothioate
  modified_base 2: mod_base = OTHER; note = 2'-O-Methyl-adenosine phosphorothioate
  modified_base 3: mod_base = OTHER; note = 2'-O-Methyl-guanosine phosphorothioate
  modified_base 21: mod_base = OTHER; note = 2'-O-Methyl-guanosine
  modified_base 25: mod_base = OTHER; note = uridine phosphorothioate
  modified_base 28: mod_base = OTHER; note = 2'-O-Methyl-adenosine
  modified_base 29: mod_base = OTHER; note = 2'-O-Methyl-guanosine
  modified_base 30: mod_base = OTHER; note = 2'-O-Methyl-cytidine
  modified_base 31: mod_base = OTHER; note = 2'-O-Methyl-uridine
  modified_base 32: mod_base = OTHER; note = 2'-O-Methyl-adenosine
  modified_base 33: mod_base = OTHER; note = 2'-O-Methyl-guanosine
  modified_base 34: mod_base = OTHER; note = 2'-O-Methyl-adenosine
  modified_base 35: mod_base = OTHER; note = 2'-O-Methyl-adenosine
  modified_base 36: mod_base = OTHER; note = 2'-O-Methyl-adenosine
  modified_base 37: mod_base = OTHER; note = 2'-O-Methyl-uridine
  modified_base 38: mod_base = OTHER; note = 2'-O-Methyl-adenosine
  modified_base 39: mod_base = OTHER; note = 2'-O-Methyl-guanosine
  modified_base 40: mod_base = OTHER; note = 2'-O-Methyl-cytidine
  modified_base 41: mod_base = OTHER; note = 2'-O-Methyl-adenosine
  modified_base 42: mod_base = OTHER; note = 2'-O-Methyl-adenosine
  modified_base 46: mod_base = OTHER; note = 2'-O-Methyl-adenosine
  modified_base 48: mod_base = OTHER; note = 2'-O-Methyl-adenosine
  modified_base 50: mod_base = OTHER; note = 2'-O-Methyl-uridine
  modified_base 52: mod_base = OTHER; note = 2'-O-Methyl-adenosine
  modified_base 53: mod_base = OTHER; note = 2'-O-Methyl-guanosine
  modified_base 54: mod_base = OTHER; note = 2'-O-Methyl-guanosine
  modified_base 55: mod_base = OTHER; note = 2'-O-Methyl-cytidine
  modified_base 56: mod_base = OTHER; note = 2'-O-Methyl-uridine
  modified_base 57: mod_base = OTHER; note = 2'-O-Methyl-adenosine
  modified_base 60: mod_base = OTHER; note = 2'-O-Methyl-cytidine
  modified_base 61: mod_base = OTHER; note = 2'-O-Methyl-cytidine
  modified_base 66: mod_base = OTHER; note = 2'-O-Methyl-uridine
  modified_base 67: mod_base = OTHER; note = 2'-O-Methyl-cytidine
  modified_base 70: mod_base = OTHER; note = 2'-O-Methyl-cytidine
  modified_base 71: mod_base = OTHER; note = 2'-O-Methyl-uridine
  modified_base 72: mod_base = OTHER; note = 2'-O-Methyl-uridine
  modified_base 74: mod_base = OTHER; note = 2'-O-Methyl-adenosine
  modified_base 75: mod_base = OTHER; note = 2'-O-Methyl-adenosine
  modified_base 76: mod_base = OTHER; note = 2'-O-Methyl-adenosine
  modified_base 77: mod_base = OTHER; note = 2'-O-Methyl-adenosine
  modified_base 78: mod_base = OTHER; note = 2'-O-Methyl-adenosine
  modified_base 79: mod_base = OTHER; note = 2'-O-Methyl-guanosine
  modified_base 80: mod_base = OTHER; note = 2'-O-Methyl-uridine
  modified_base 82: mod_base = OTHER; note = 2'-O-Methyl-guanosine
  modified_base 83: mod_base = OTHER; note = 2'-O-Methyl-cytidine
  modified_base 84: mod_base = OTHER; note = 2'-O-Methyl-adenosine
  modified_base 85: mod_base = OTHER; note = 2'-O-Methyl-cytidine
  modified_base 86: mod_base = OTHER; note = 2'-O-Methyl-cytidine
  modified_base 87: mod_base = OTHER; note = 2'-O-Methyl-guanosine
  modified_base 89: mod_base = OTHER; note = 2'-O-Methyl-guanosine
  modified_base 92: mod_base = OTHER; note = 2'-O-Methyl-guanosine
  modified_base 93: mod_base = OTHER; note = 2'-O-Methyl-guanosine
  modified_base 94: mod_base = OTHER; note = 2'-O-Methyl-uridine
  modified_base 95: mod_base = OTHER; note = 2'-O-Methyl-guanosine
  modified_base 96: mod_base = OTHER; note = 2'-O-Methyl-cytidine
  modified_base 97: mod_base = OTHER; note = 2'-O-Methyl-uridine phosphorothioate
  modified_base 98: mod_base = OTHER; note = 2'-O-Methyl-uridine phosphorothioate
  modified_base 99: mod_base = OTHER; note = 2'-O-Methyl-uridine phosphorothioate
  modified_base 100: mod_base = OTHER; note = 2'-O-Methyl-uridine
  misc_difference 101: note = a, c, g, inosine, u, deoxyadenosine, deoxyguanosine, deoxycytidine, deoxyinosine, thymine, ribonebularine, 2'-O-methylnebularine, or 2'-deoxynebularine
  misc_difference 102: note = a, c, g, inosine, u, deoxyadenosine, deoxyguanosine, deoxycytidine, deoxyinosine, thymine, ribonebularine, 2'-O-methylnebularine, or 2'-deoxynebularine
  misc_difference 103: note = a, c, g, inosine, u, deoxyadenosine, deoxyguanosine, deoxycytidine, deoxyinosine, thymine, ribonebularine, 2'-O-methylnebularine, or 2'-deoxynebularine

SEQ ID NO: 2798 - RNA, 103 nt, synthetic construct; identical to SEQ ID NO: 1797
  source 1..103: mol_type = other RNA
  modified_base 1: mod_base = OTHER; note = 2'-O-Methyl-cytidine phosphorothioate
  modified_base 2: mod_base = OTHER; note = 2'-O-Methyl-adenosine phosphorothioate
  modified_base 3: mod_base = OTHER; note = 2'-O-Methyl-guanosine phosphorothioate
  modified_base 21: mod_base = OTHER; note = 2'-O-Methyl-guanosine
  modified_base 25: mod_base = OTHER; note = uridine phosphorothioate
  modified_base 28: mod_base = OTHER; note = 2'-O-Methyl-adenosine
  modified_base 29: mod_base = OTHER; note = 2'-O-Methyl-guanosine
  modified_base 30: mod_base = OTHER; note = 2'-O-Methyl-cytidine
  modified_base 31: mod_base = OTHER; note = 2'-O-Methyl-uridine
  modified_base 32: mod_base = OTHER; note = 2'-O-Methyl-adenosine
  modified_base 33: mod_base = OTHER; note = 2'-O-Methyl-guanosine
  modified_base 34: mod_base = OTHER; note = 2'-O-Methyl-adenosine
  modified_base 35: mod_base = OTHER; note = 2'-O-Methyl-adenosine
  modified_base 36: mod_base = OTHER; note = 2'-O-Methyl-adenosine
  modified_base 37: mod_base = OTHER; note = 2'-O-Methyl-uridine
  modified_base 38: mod_base = OTHER; note = 2'-O-Methyl-adenosine
  modified_base 39: mod_base = OTHER; note = 2'-O-Methyl-guanosine
  modified_base 40: mod_base = OTHER; note = 2'-O-Methyl-cytidine
  modified_base 41: mod_base = OTHER; note = 2'-O-Methyl-adenosine
  modified_base 42: mod_base = OTHER; note = 2'-O-Methyl-adenosine
  modified_base 46: mod_base = OTHER; note = 2'-O-Methyl-adenosine
  modified_base 48: mod_base = OTHER; note = 2'-O-Methyl-adenosine
  modified_base 50: mod_base = OTHER; note = 2'-O-Methyl-uridine
  modified_base 52: mod_base = OTHER; note = 2'-O-Methyl-adenosine
  modified_base 53: mod_base = OTHER; note = 2'-O-Methyl-guanosine
  modified_base 54: mod_base = OTHER; note = 2'-O-Methyl-guanosine
  modified_base 57: mod_base = OTHER; note = 2'-O-Methyl-adenosine
  modified_base 61: mod_base = OTHER; note = 2'-O-Methyl-cytidine
  modified_base 66: mod_base = OTHER; note = 2'-O-Methyl-uridine
  modified_base 67: mod_base = OTHER; note = 2'-O-Methyl-cytidine
  modified_base 70: mod_base = OTHER; note = 2'-O-Methyl-cytidine
  modified_base 71: mod_base = OTHER; note = 2'-O-Methyl-uridine
  modified_base 72: mod_base = OTHER; note = 2'-O-Methyl-uridine
  modified_base 73: mod_base = OTHER; note = 2'-O-Methyl-guanosine
  modified_base 74: mod_base = OTHER; note = 2'-O-Methyl-adenosine
  modified_base 75: mod_base = OTHER; note = 2'-O-Methyl-adenosine
  modified_base 76: mod_base = OTHER; note = 2'-O-Methyl-adenosine
  modified_base 77: mod_base = OTHER; note = 2'-O-Methyl-adenosine
  modified_base 78: mod_base = OTHER; note = 2'-O-Methyl-adenosine
  modified_base 79: mod_base = OTHER; note = 2'-O-Methyl-guanosine
  modified_base 80: mod_base = OTHER; note = 2'-O-Methyl-uridine
  modified_base 82: mod_base = OTHER; note = 2'-O-Methyl-guanosine
  modified_base 83: mod_base = OTHER; note = 2'-O-Methyl-cytidine
  modified_base 84: mod_base = OTHER; note = 2'-O-Methyl-adenosine
  modified_base 85: mod_base = OTHER; note = 2'-O-Methyl-cytidine
  modified_base 86: mod_base = OTHER; note = 2'-O-Methyl-cytidine
  modified_base 87: mod_base = OTHER; note = 2'-O-Methyl-guanosine
  modified_base 89: mod_base = OTHER; note = 2'-O-Methyl-guanosine
  modified_base 92: mod_base = OTHER; note = 2'-O-Methyl-guanosine
  modified_base 93: mod_base = OTHER; note = 2'-O-Methyl-guanosine
  modified_base 94: mod_base = OTHER; note = 2'-O-Methyl-uridine
  modified_base 95: mod_base = OTHER; note = 2'-O-Methyl-guanosine
  modified_base 96: mod_base = OTHER; note = 2'-O-Methyl-cytidine
  modified_base 97: mod_base = OTHER; note = 2'-O-Methyl-uridine phosphorothioate
  modified_base 98: mod_base = OTHER; note = 2'-O-Methyl-uridine phosphorothioate
  modified_base 99: mod_base = OTHER; note = 2'-O-Methyl-uridine phosphorothioate
  modified_base 100: mod_base = OTHER; note = 2'-O-Methyl-uridine
  misc_difference 101: note = a, c, g, inosine, u, deoxyadenosine, deoxyguanosine, deoxycytidine, deoxyinosine, thymine, ribonebularine, 2'-O-methylnebularine, or 2'-deoxynebularine
  misc_difference 102: note = a, c, g, inosine, u, deoxyadenosine, deoxyguanosine, deoxycytidine, deoxyinosine, thymine, ribonebularine, 2'-O-methylnebularine, or 2'-deoxynebularine
  misc_difference 103: note = a, c, g, inosine, u, deoxyadenosine, deoxyguanosine, deoxycytidine, deoxyinosine, thymine, ribonebularine, 2'-O-methylnebularine, or 2'-deoxynebularine

SEQ ID NO: 2799 - RNA, 103 nt, synthetic construct; identical to SEQ ID NO: 1797
  source 1..103: mol_type = other RNA
  modified_base 1: mod_base = OTHER; note = 2'-O-Methyl-cytidine phosphorothioate
  modified_base 2: mod_base = OTHER; note = 2'-O-Methyl-adenosine phosphorothioate
  modified_base 3: mod_base = OTHER; note = 2'-O-Methyl-guanosine phosphorothioate
  modified_base 21: mod_base = OTHER; note = 2'-O-Methyl-guanosine
  modified_base 25: mod_base = OTHER; note = uridine phosphorothioate
  modified_base 28: mod_base = OTHER; note = 2'-O-Methyl-adenosine
  modified_base 29: mod_base = OTHER; note = 2'-O-Methyl-guanosine
  modified_base 30: mod_base = OTHER; note = 2'-O-Methyl-cytidine
  modified_base 31: mod_base = OTHER; note = 2'-O-Methyl-uridine
  modified_base 32: mod_base = OTHER; note = 2'-O-Methyl-adenosine
  modified_base 33: mod_base = OTHER; note = 2'-O-Methyl-guanosine
  modified_base 34: mod_base = OTHER; note = 2'-O-Methyl-adenosine
  modified_base 35: mod_base = OTHER; note = 2'-O-Methyl-adenosine
  modified_base 36: mod_base = OTHER; note = 2'-O-Methyl-adenosine
  modified_base 37: mod_base = OTHER; note = 2'-O-Methyl-uridine
  modified_base 38: mod_base = OTHER; note = 2'-O-Methyl-adenosine
  modified_base 39: mod_base = OTHER; note = 2'-O-Methyl-guanosine
  modified_base 40: mod_base = OTHER; note = 2'-O-Methyl-cytidine
  modified_base 41: mod_base = OTHER; note = 2'-O-Methyl-adenosine
  modified_base 42: mod_base = OTHER; note = 2'-O-Methyl-adenosine
  modified_base 46: mod_base = OTHER; note = 2'-O-Methyl-adenosine
  modified_base 48: mod_base = OTHER; note = 2'-O-Methyl-adenosine
  modified_base 50: mod_base = OTHER; note = 2'-O-Methyl-uridine
  modified_base 52: mod_base = OTHER; note = 2'-O-Methyl-adenosine
  modified_base 53: mod_base = OTHER; note = 2'-O-Methyl-guanosine
  modified_base 54: mod_base = OTHER; note = 2'-O-Methyl-guanosine
  modified_base 57: mod_base = OTHER; note = 2'-O-Methyl-adenosine
  modified_base 61: mod_base = OTHER; note = 2'-O-Methyl-cytidine
  modified_base 66: mod_base = OTHER; note = 2'-O-Methyl-uridine
  modified_base 67: mod_base = OTHER; note = 2'-O-Methyl-cytidine
  modified_base 70: mod_base = OTHER; note = 2'-O-Methyl-cytidine
  modified_base 71: mod_base = OTHER; note = 2'-O-Methyl-uridine
  modified_base 72: mod_base = OTHER; note = 2'-O-Methyl-uridine
  modified_base 73: mod_base = OTHER; note = 2'-O-Methyl-guanosine
  modified_base 74: mod_base = OTHER; note = 2'-O-Methyl-adenosine
  modified_base 75: mod_base = OTHER; note = 2'-O-Methyl-adenosine
  modified_base 76: mod_base = OTHER; note = 2'-O-Methyl-adenosine
  modified_base 77: mod_base = OTHER; note = 2'-O-Methyl-adenosine
  modified_base 78: mod_base = OTHER; note = 2'-O-Methyl-adenosine
  modified_base 79: mod_base = OTHER; note = 2'-O-Methyl-guanosine
  modified_base 80: mod_base = OTHER; note = 2'-O-Methyl-uridine
  modified_base 82: mod_base = OTHER; note = 2'-O-Methyl-guanosine
  modified_base 83: mod_base = OTHER; note = 2'-O-Methyl-cytidine
  modified_base 84: mod_base = OTHER; note = 2'-O-Methyl-adenosine
  modified_base 85: mod_base = OTHER; note = 2'-O-Methyl-cytidine
  modified_base 86: mod_base = OTHER; note = 2'-O-Methyl-cytidine
  modified_base 87: mod_base = OTHER; note = 2'-O-Methyl-guanosine
  modified_base 89: mod_base = OTHER; note = 2'-O-Methyl-guanosine
  modified_base 91: mod_base = OTHER; note = 2'-O-Methyl-cytidine
  modified_base 92: mod_base = OTHER; note = 2'-O-Methyl-guanosine
  modified_base 93: mod_base = OTHER; note = 2'-O-Methyl-guanosine
  modified_base 94: mod_base = OTHER; note = 2'-O-Methyl-uridine
  modified_base 95: mod_base = OTHER; note = 2'-O-Methyl-guanosine
  modified_base 96: mod_base = OTHER; note = 2'-O-Methyl-cytidine
  modified_base 97: mod_base = OTHER; note = 2'-O-Methyl-uridine phosphorothioate
  modified_base 98: mod_base = OTHER; note = 2'-O-Methyl-uridine phosphorothioate
  modified_base 99: mod_base = OTHER; note = 2'-O-Methyl-uridine phosphorothioate
  modified_base 100: mod_base = OTHER; note = 2'-O-Methyl-uridine
  misc_difference 101: note = a, c, g, inosine, u, deoxyadenosine, deoxyguanosine, deoxycytidine, deoxyinosine, thymine, ribonebularine, 2'-O-methylnebularine, or 2'-deoxynebularine
  misc_difference 102: note = a, c, g, inosine, u, deoxyadenosine, deoxyguanosine, deoxycytidine, deoxyinosine, thymine, ribonebularine, 2'-O-methylnebularine, or 2'-deoxynebularine
  misc_difference 103: note = a, c, g, inosine, u, deoxyadenosine, deoxyguanosine, deoxycytidine, deoxyinosine, thymine, ribonebularine, 2'-O-methylnebularine, or 2'-deoxynebularine

SEQ ID NO: 2800 - RNA, 103 nt, synthetic construct; identical to SEQ ID NO: 1797
  source 1..103: mol_type = other RNA
  modified_base 1: mod_base = OTHER; note = 2'-O-Methyl-cytidine phosphorothioate
  modified_base 2: mod_base = OTHER; note = 2'-O-Methyl-adenosine phosphorothioate
  modified_base 3: mod_base = OTHER; note = 2'-O-Methyl-guanosine phosphorothioate
  modified_base 21: mod_base = OTHER; note = 2'-O-Methyl-guanosine
  modified_base 25: mod_base = OTHER; note = uridine phosphorothioate
  modified_base 28: mod_base = OTHER; note = 2'-O-Methyl-adenosine
  modified_base 29: mod_base = OTHER; note = 2'-O-Methyl-guanosine
  modified_base 30: mod_base = OTHER; note = 2'-O-Methyl-cytidine
  modified_base 31: mod_base = OTHER; note = 2'-O-Methyl-uridine
  modified_base 32: mod_base = OTHER; note = 2'-O-Methyl-adenosine
  modified_base 34: mod_base = OTHER; note = 2'-O-Methyl-adenosine
  modified_base 35: mod_base = OTHER; note = 2'-O-Methyl-adenosine
  modified_base 36: mod_base = OTHER; note = 2'-O-Methyl-adenosine
  modified_base 37: mod_base = OTHER; note = 2'-O-Methyl-uridine
  modified_base 38: mod_base = OTHER; note = 2'-O-Methyl-adenosine
  modified_base 39: mod_base = OTHER; note = 2'-O-Methyl-guanosine
  modified_base 40: mod_base = OTHER; note = 2'-O-Methyl-cytidine
  modified_base 41: mod_base = OTHER; note = 2'-O-Methyl-adenosine
  modified_base 42: mod_base = OTHER; note = 2'-O-Methyl-adenosine
  modified_base 46: mod_base = OTHER; note = 2'-O-Methyl-adenosine
  modified_base 48: mod_base = OTHER; note = 2'-O-Methyl-adenosine
  modified_base 50: mod_base = OTHER; note = 2'-O-Methyl-uridine
  modified_base 52: mod_base = OTHER; note = 2'-O-Methyl-adenosine
  modified_base 53: mod_base = OTHER; note = 2'-O-Methyl-guanosine
  modified_base 54: mod_base = OTHER; note = 2'-O-Methyl-guanosine
  modified_base 57: mod_base = OTHER; note = 2'-O-Methyl-adenosine
  modified_base 61: mod_base = OTHER; note = 2'-O-Methyl-cytidine
  modified_base 66: mod_base = OTHER; note = 2'-O-Methyl-uridine
  modified_base 67: mod_base = OTHER; note = 2'-O-Methyl-cytidine
  modified_base 70: mod_base = OTHER; note = 2'-O-Methyl-cytidine
  modified_base 71: mod_base = OTHER; note = 2'-O-Methyl-uridine
  modified_base 72: mod_base = OTHER; note = 2'-O-Methyl-uridine
  modified_base 73: mod_base = OTHER; note = 2'-O-Methyl-guanosine
  modified_base 74: mod_base = OTHER; note = 2'-O-Methyl-adenosine
  modified_base 75: mod_base = OTHER; note = 2'-O-Methyl-adenosine
  modified_base 76: mod_base = OTHER; note = 2'-O-Methyl-adenosine
  modified_base 77: mod_base = OTHER; note = 2'-O-Methyl-adenosine
  modified_base 78: mod_base = OTHER; note = 2'-O-Methyl-adenosine
  modified_base 79: mod_base = OTHER; note = 2'-O-Methyl-guanosine
  modified_base 80: mod_base = OTHER; note = 2'-O-Methyl-uridine
  modified_base 82: mod_base = OTHER; note = 2'-O-Methyl-guanosine
  modified_base 83: mod_base = OTHER; note = 2'-O-Methyl-cytidine
  modified_base 84: mod_base = OTHER; note = 2'-O-Methyl-adenosine
  modified_base 85: mod_base = OTHER; note = 2'-O-Methyl-cytidine
  modified_base 86: mod_base = OTHER; note = 2'-O-Methyl-cytidine
  modified_base 87: mod_base = OTHER; note = 2'-O-Methyl-guanosine
  modified_base 89: mod_base = OTHER; note = 2'-O-Methyl-guanosine
  modified_base 92: mod_base = OTHER; note = 2'-O-Methyl-guanosine
  modified_base 93: mod_base = OTHER; note = 2'-O-Methyl-guanosine
  modified_base 94: mod_base = OTHER; note = 2'-O-Methyl-uridine
  modified_base 95: mod_base = OTHER; note = 2'-O-Methyl-guanosine
  modified_base 96: mod_base = OTHER; note = 2'-O-Methyl-cytidine
  modified_base 97: mod_base = OTHER; note = 2'-O-Methyl-uridine phosphorothioate
  modified_base 98: mod_base = OTHER; note = 2'-O-Methyl-uridine phosphorothioate
  modified_base 99: mod_base = OTHER; note = 2'-O-Methyl-uridine phosphorothioate
  modified_base 100: mod_base = OTHER; note = 2'-O-Methyl-uridine
  misc_difference 101: note = a, c, g, inosine, u, deoxyadenosine, deoxyguanosine, deoxycytidine, deoxyinosine, thymine, ribonebularine, 2'-O-methylnebularine, or 2'-deoxynebularine
  misc_difference 102: note = a, c, g, inosine, u, deoxyadenosine, deoxyguanosine, deoxycytidine, deoxyinosine, thymine, ribonebularine, 2'-O-methylnebularine, or 2'-deoxynebularine
  misc_difference 103: note = a, c, g, inosine, u, deoxyadenosine, deoxyguanosine, deoxycytidine, deoxyinosine, thymine, ribonebularine, 2'-O-methylnebularine, or 2'-deoxynebularine

SEQ ID NO: 2801 - RNA, 103 nt, synthetic construct; identical to SEQ ID NO: 1797
  source 1..103: mol_type = other RNA
  modified_base 1: mod_base = OTHER; note = 2'-O-Methyl-cytidine phosphorothioate
  modified_base 2: mod_base = OTHER; note = 2'-O-Methyl-adenosine phosphorothioate
  modified_base 3: mod_base = OTHER; note = 2'-O-Methyl-guanosine phosphorothioate
  modified_base 21: mod_base = OTHER; note = 2'-O-Methyl-guanosine
  modified_base 25: mod_base = OTHER; note = uridine phosphorothioate
  modified_base 28: mod_base = OTHER; note = 2'-O-Methyl-adenosine
  modified_base 29: mod_base = OTHER; note = 2'-O-Methyl-guanosine
  modified_base 30: mod_base = OTHER; note = 2'-O-Methyl-cytidine
  modified_base 31: mod_base = OTHER; note = 2'-O-Methyl-uridine
  modified_base 32: mod_base = OTHER; note = 2'-O-Methyl-adenosine
  modified_base 34: mod_base = OTHER; note = 2'-O-Methyl-adenosine
  modified_base 35: mod_base = OTHER; note = 2'-O-Methyl-adenosine
  modified_base 36: mod_base = OTHER; note = 2'-O-Methyl-adenosine
  modified_base 37: mod_base = OTHER; note = 2'-O-Methyl-uridine
  modified_base 38: mod_base = OTHER; note = 2'-O-Methyl-adenosine
  modified_base 39: mod_base = OTHER; note = 2'-O-Methyl-guanosine
  modified_base 40: mod_base = OTHER; note = 2'-O-Methyl-cytidine
  modified_base 41: mod_base = OTHER; note = 2'-O-Methyl-adenosine
  modified_base 42: mod_base = OTHER; note = 2'-O-Methyl-adenosine
  modified_base 46: mod_base = OTHER; note = 2'-O-Methyl-adenosine
  modified_base 48: mod_base = OTHER; note = 2'-O-Methyl-adenosine
  modified_base 50: mod_base = OTHER; note = 2'-O-Methyl-uridine
  modified_base 52: mod_base = OTHER; note = 2'-O-Methyl-adenosine
  modified_base 53: mod_base = OTHER; note = 2'-O-Methyl-guanosine
  modified_base 54: mod_base = OTHER; note = 2'-O-Methyl-guanosine
  modified_base 57: mod_base = OTHER; note = 2'-O-Methyl-adenosine
  modified_base 61: mod_base = OTHER; note = 2'-O-Methyl-cytidine
  modified_base 66: mod_base = OTHER; note = 2'-O-Methyl-uridine
  modified_base 67: mod_base = OTHER; note = 2'-O-Methyl-cytidine
  modified_base 70: mod_base = OTHER; note = 2'-O-Methyl-cytidine
  modified_base 71: mod_base = OTHER; note = 2'-O-Methyl-uridine
  modified_base 72: mod_base = OTHER; note = 2'-O-Methyl-uridine
  modified_base 73: mod_base = OTHER; note = 2'-O-Methyl-guanosine
  modified_base 74: mod_base = OTHER; note = 2'-O-Methyl-adenosine
  modified_base 75: mod_base = OTHER; note = 2'-O-Methyl-adenosine
  modified_base 76: mod_base = OTHER; note = 2'-O-Methyl-adenosine
  modified_base 77: mod_base = OTHER; note = 2'-O-Methyl-adenosine
  modified_base 78: mod_base = OTHER; note = 2'-O-Methyl-adenosine
  modified_base 79: mod_base = OTHER; note = 2'-O-Methyl-guanosine
  modified_base 80: mod_base = OTHER; note = 2'-O-Methyl-uridine
  modified_base 82: mod_base = OTHER; note = 2'-O-Methyl-guanosine
  modified_base 83: mod_base = OTHER; note = 2'-O-Methyl-cytidine
  modified_base 84: mod_base = OTHER; note = 2'-O-Methyl-adenosine
  modified_base 85: mod_base = OTHER; note = 2'-O-Methyl-cytidine
  modified_base 86: mod_base = OTHER; note = 2'-O-Methyl-cytidine
  modified_base 87: mod_base = OTHER; note = 2'-O-Methyl-guanosine
  modified_base 89: mod_base = OTHER; note = 2'-O-Methyl-guanosine
  modified_base 91: mod_base = OTHER; note = 2'-O-Methyl-cytidine
  modified_base 92: mod_base = OTHER; note = 2'-O-Methyl-guanosine
  modified_base 93: mod_base = OTHER; note = 2'-O-Methyl-guanosine
  modified_base 94: mod_base = OTHER; note = 2'-O-Methyl-uridine
  modified_base 95: mod_base = OTHER; note = 2'-O-Methyl-guanosine
  modified_base 96: mod_base = OTHER; note = 2'-O-Methyl-cytidine
  modified_base 97: mod_base = OTHER; note = 2'-O-Methyl-uridine phosphorothioate
  modified_base 98: mod_base = OTHER; note = 2'-O-Methyl-uridine phosphorothioate
  modified_base 99: mod_base = OTHER; note = 2'-O-Methyl-uridine phosphorothioate
  modified_base 100: mod_base = OTHER; note = 2'-O-Methyl-uridine
  misc_difference 101: note = a, c, g, inosine, u, deoxyadenosine, deoxyguanosine, deoxycytidine, deoxyinosine, thymine, ribonebularine, 2'-O-methylnebularine, or 2'-deoxynebularine
  misc_difference 102: note = a, c, g, inosine, u, deoxyadenosine, deoxyguanosine, deoxycytidine, deoxyinosine, thymine, ribonebularine, 2'-O-methylnebularine, or 2'-deoxynebularine
  misc_difference 103: note = a, c, g, inosine, u, deoxyadenosine, deoxyguanosine, deoxycytidine, deoxyinosine, thymine, ribonebularine, 2'-O-methylnebularine, or 2'-deoxynebularine

SEQ ID NO: 2802 - RNA, 103 nt, synthetic construct; identical to SEQ ID NO: 1797
  source 1..103: mol_type = other RNA
  modified_base 1: mod_base = OTHER; note = 2'-O-Methyl-cytidine phosphorothioate
  modified_base 2: mod_base = OTHER; note = 2'-O-Methyl-adenosine phosphorothioate
  modified_base 3: mod_base = OTHER; note = 2'-O-Methyl-guanosine phosphorothioate
  modified_base 21: mod_base = OTHER; note = 2'-O-Methyl-guanosine
  modified_base 25: mod_base = OTHER; note = uridine phosphorothioate
  modified_base 28: mod_base = OTHER; note = 2'-O-Methyl-adenosine
  modified_base 29: mod_base = OTHER; note = 2'-O-Methyl-guanosine
  modified_base 30: mod_base = OTHER; note = 2'-O-Methyl-cytidine
  modified_base 31: mod_base = OTHER; note = 2'-O-Methyl-uridine
  modified_base 32: mod_base = OTHER; note = 2'-O-Methyl-adenosine
  modified_base 34: mod_base = OTHER; note = 2'-O-Methyl-adenosine
  modified_base 35: mod_base = OTHER; note = 2'-O-Methyl-adenosine
  modified_base 36: mod_base = OTHER; note = 2'-O-Methyl-adenosine
  modified_base 37: mod_base = OTHER; note = 2'-O-Methyl-uridine
  modified_base 38: mod_base = OTHER; note = 2'-O-Methyl-adenosine
  modified_base 39: mod_base = OTHER; note = 2'-O-Methyl-guanosine
  modified_base 40: mod_base = OTHER; note = 2'-O-Methyl-cytidine
  modified_base 41: mod_base = OTHER; note = 2'-O-Methyl-adenosine
  modified_base 42: mod_base = OTHER; note = 2'-O-Methyl-adenosine
  modified_base 46: mod_base = OTHER; note = 2'-O-Methyl-adenosine
  modified_base 48: mod_base = OTHER; note = 2'-O-Methyl-adenosine
  modified_base 50: mod_base = OTHER; note = 2'-O-Methyl-uridine
  modified_base 52: mod_base = OTHER; note = 2'-O-Methyl-adenosine
  modified_base 53: mod_base = OTHER; note = 2'-O-Methyl-guanosine
  modified_base 54: mod_base = OTHER; note = 2'-O-Methyl-guanosine
  modified_base 55: mod_base = OTHER; note = 2'-O-Methyl-cytidine
  modified_base 56: mod_base = OTHER; note = 2'-O-Methyl-uridine
  modified_base 57: mod_base = OTHER; note = 2'-O-Methyl-adenosine
  modified_base 60: mod_base = OTHER; note = 2'-O-Methyl-cytidine
  modified_base 61: mod_base = OTHER; note = 2'-O-Methyl-cytidine
  modified_base 66: mod_base = OTHER; note = 2'-O-Methyl-uridine
  modified_base 67: mod_base = OTHER; note = 2'-O-Methyl-cytidine
  modified_base 70: mod_base = OTHER; note = 2'-O-Methyl-cytidine
  modified_base 71: mod_base = OTHER; note = 2'-O-Methyl-uridine
  modified_base 72: mod_base = OTHER; note = 2'-O-Methyl-uridine
  modified_base 74: mod_base = OTHER; note = 2'-O-Methyl-adenosine
  modified_base 75: mod_base = OTHER; note = 2'-O-Methyl-adenosine
  modified_base 76: mod_base = OTHER; note = 2'-O-Methyl-adenosine
  modified_base 77: mod_base = OTHER; note = 2'-O-Methyl-adenosine
  modified_base 78: mod_base = OTHER; note = 2'-O-Methyl-adenosine
  modified_base 79: mod_base = OTHER; note = 2'-O-Methyl-guanosine
  modified_base 80: mod_base = OTHER; note = 2'-O-Methyl-uridine
  modified_base 82: mod_base = OTHER; note = 2'-O-Methyl-guanosine
  modified_base 83: mod_base = OTHER; note = 2'-O-Methyl-cytidine
  modified_base 84: mod_base = OTHER; note = 2'-O-Methyl-adenosine
  modified_base 85: mod_base = OTHER; note = 2'-O-Methyl-cytidine
  modified_base 86: mod_base = OTHER; note = 2'-O-Methyl-cytidine
  modified_base 87: mod_base = OTHER; note = 2'-O-Methyl-guanosine
  modified_base 89: mod_base = OTHER; note = 2'-O-Methyl-guanosine
  modified_base 92: mod_base = OTHER; note = 2'-O-Methyl-guanosine
  modified_base 93: mod_base = OTHER; note = 2'-O-Methyl-guanosine
  modified_base 94: mod_base = OTHER; note = 2'-O-Methyl-uridine
  modified_base 95: mod_base = OTHER; note = 2'-O-Methyl-guanosine
  modified_base 96: mod_base = OTHER; note = 2'-O-Methyl-cytidine
  modified_base 97: mod_base = OTHER; note = 2'-O-Methyl-uridine phosphorothioate
  modified_base 98: mod_base = OTHER; note = 2'-O-Methyl-uridine phosphorothioate
  modified_base 99: mod_base = OTHER; note = 2'-O-Methyl-uridine phosphorothioate
  modified_base 100: mod_base = OTHER; note = 2'-O-Methyl-uridine
  misc_difference 101: note = a, c, g, inosine, u, deoxyadenosine, deoxyguanosine, deoxycytidine, deoxyinosine, thymine, ribonebularine, 2'-O-methylnebularine, or 2'-deoxynebularine
  misc_difference 102: note = a, c, g, inosine, u, deoxyadenosine, deoxyguanosine, deoxycytidine, deoxyinosine, thymine, ribonebularine, 2'-O-methylnebularine, or 2'-deoxynebularine
  misc_difference 103: note = a, c, g, inosine, u, deoxyadenosine, deoxyguanosine, deoxycytidine, deoxyinosine, thymine, ribonebularine, 2'-O-methylnebularine, or 2'-deoxynebularine

SEQ ID NO: 2803 - RNA, 103 nt, synthetic construct; identical to SEQ ID NO: 1795
  source 1..103: mol_type = other RNA
  modified_base 1: mod_base = OTHER; note = 2'-O-Methyl-cytidine phosphorothioate
  modified_base 2: mod_base = OTHER; note = 2'-O-Methyl-cytidine phosphorothioate
  modified_base 3: mod_base = OTHER; note = 2'-O-Methyl-cytidine phosphorothioate
  modified_base 21: mod_base = OTHER; note = 2'-O-Methyl-guanosine
  modified_base 28: mod_base = OTHER; note = 2'-O-Methyl-adenosine
  modified_base 29: mod_base = OTHER; note = 2'-O-Methyl-guanosine
  modified_base 30: mod_base = OTHER; note = 2'-O-Methyl-cytidine
  modified_base 31: mod_base = OTHER; note = 2'-O-Methyl-uridine
  modified_base 32: mod_base = OTHER; note = 2'-O-Methyl-adenosine
  modified_base 33: mod_base = OTHER; note = 2'-O-Methyl-guanosine
  modified_base 34: mod_base = OTHER; note = 2'-O-Methyl-adenosine
  modified_base 35: mod_base = OTHER; note = 2'-O-Methyl-adenosine
  modified_base 36: mod_base = OTHER; note = 2'-O-Methyl-adenosine
  modified_base 37: mod_base = OTHER; note = 2'-O-Methyl-uridine
  modified_base 38: mod_base = OTHER; note = 2'-O-Methyl-adenosine
  modified_base 39: mod_base = OTHER; note = 2'-O-Methyl-guanosine
  modified_base 40: mod_base = OTHER; note = 2'-O-Methyl-cytidine
  modified_base 41: mod_base = OTHER; note = 2'-O-Methyl-adenosine
  modified_base 42: mod_base = OTHER; note = 2'-O-Methyl-adenosine
  modified_base 45: mod_base = OTHER; note = uridine phosphorothioate
  modified_base 46: mod_base = OTHER; note = 2'-O-Methyl-adenosine
  modified_base 48: mod_base = OTHER; note = 2'-O-Methyl-adenosine
  modified_base 50: mod_base = OTHER; note = 2'-O-Methyl-uridine
  modified_base 52: mod_base = OTHER; note = 2'-O-Methyl-adenosine
  modified_base 53: mod_base = OTHER; note = 2'-O-Methyl-guanosine
  modified_base 54: mod_base = OTHER; note = 2'-O-Methyl-guanosine
  modified_base 55: mod_base = OTHER; note = 2'-O-Methyl-cytidine
  modified_base 56: mod_base = OTHER; note = 2'-O-Methyl-uridine
  modified_base 57: mod_base = OTHER; note = 2'-O-Methyl-adenosine
  modified_base 60: mod_base = OTHER; note = 2'-O-Methyl-cytidine
  modified_base 61: mod_base = OTHER; note = 2'-O-Methyl-cytidine
  modified_base 64: mod_base = OTHER; note = uridine phosphorothioate
  modified_base 66: mod_base = OTHER; note = 2'-O-Methyl-uridine
  modified_base 67: mod_base = OTHER; note = 2'-O-Methyl-cytidine
  modified_base 70: mod_base = OTHER; note = 2'-O-Methyl-cytidine
  modified_base 71: mod_base = OTHER; note = 2'-O-Methyl-uridine
  modified_base 72: mod_base = OTHER; note = 2'-O-Methyl-uridine
  modified_base 73: mod_base = OTHER; note = 2'-O-Methyl-guanosine
  modified_base 74: mod_base = OTHER; note = 2'-O-Methyl-adenosine
  modified_base 75: mod_base = OTHER; note = 2'-O-Methyl-adenosine
  modified_base 76: mod_base = OTHER; note = 2'-O-Methyl-adenosine
  modified_base 77: mod_base = OTHER; note = 2'-O-Methyl-adenosine
  modified_base 78: mod_base = OTHER; note = 2'-O-Methyl-adenosine
  modified_base 79: mod_base = OTHER; note = 2'-O-Methyl-guanosine
  modified_base 80: mod_base = OTHER; note = 2'-O-Methyl-uridine
  modified_base 81: mod_base = OTHER; note = 2'-O-Methyl-guanosine
  modified_base 83: mod_base = OTHER; note = 2'-O-Methyl-cytidine
  modified_base 84: mod_base = OTHER; note = 2'-O-Methyl-adenosine
  modified_base 85: mod_base = OTHER; note = 2'-O-Methyl-cytidine
  modified_base 86: mod_base = OTHER; note = 2'-O-Methyl-cytidine
  modified_base 87: mod_base = OTHER; note = 2'-O-Methyl-guanosine
  modified_base 88: mod_base = OTHER; note = 2'-O-Methyl-adenosine
  modified_base 89: mod_base = OTHER; note = 2'-O-Methyl-guanosine
  modified_base 90: mod_base = OTHER; note = 2'-O-Methyl-uridine
  modified_base 91: mod_base = OTHER; note = 2'-O-Methyl-cytidine
  modified_base 92: mod_base = OTHER; note = 2'-O-Methyl-guanosine
  modified_base 93: mod_base = OTHER; note = 2'-O-Methyl-guanosine
  modified_base 94: mod_base = OTHER; note = 2'-O-Methyl-uridine
  modified_base 95: mod_base = OTHER; note = 2'-O-Methyl-guanosine
  modified_base 96: mod_base = OTHER; note = 2'-O-Methyl-cytidine
  modified_base 97: mod_base = OTHER; note = 2'-O-Methyl-uridine phosphorothioate
  modified_base 98: mod_base = OTHER; note = 2'-O-Methyl-uridine phosphorothioate
  modified_base 99: mod_base = OTHER; note = 2'-O-Methyl-uridine phosphorothioate
  modified_base 100: mod_base = OTHER; note = 2'-O-Methyl-uridine
  misc_difference 101: note = a, c, g, inosine, u, deoxyadenosine, deoxyguanosine, deoxycytidine, deoxyinosine, thymine, ribonebularine, 2'-O-methylnebularine, or 2'-deoxynebularine
  misc_difference 102: note = a, c, g, inosine, u, deoxyadenosine, deoxyguanosine, deoxycytidine, deoxyinosine, thymine, ribonebularine, 2'-O-methylnebularine, or 2'-deoxynebularine
  misc_difference 103: note = a, c, g, inosine, u, deoxyadenosine, deoxyguanosine, deoxycytidine, deoxyinosine, thymine, ribonebularine, 2'-O-methylnebularine, or 2'-deoxynebularine

SEQ ID NO: 2804 - RNA, 103 nt, synthetic construct; identical to SEQ ID NO: 1795
  source 1..103: mol_type = other RNA
  modified_base 1: mod_base = OTHER; note = 2'-O-Methyl-cytidine phosphorothioate
  modified_base 2: mod_base = OTHER; note = 2'-O-Methyl-cytidine phosphorothioate
  modified_base 3: mod_base = OTHER; note = 2'-O-Methyl-cytidine phosphorothioate
  modified_base 21: mod_base = OTHER; note = 2'-O-Methyl-guanosine
  modified_base 28: mod_base = OTHER; note = 2'-O-Methyl-adenosine
  modified_base 29: mod_base = OTHER; note = 2'-O-Methyl-guanosine
  modified_base 30: mod_base = OTHER; note = 2'-O-Methyl-cytidine
  modified_base 31: mod_base = OTHER; note = 2'-O-Methyl-uridine
  modified_base 32: mod_base = OTHER; note = 2'-O-Methyl-adenosine
  modified_base 34: mod_base = OTHER; note = 2'-O-Methyl-adenosine
  modified_base 35: mod_base = OTHER; note = 2'-O-Methyl-adenosine
  modified_base 36: mod_base = OTHER; note = 2'-O-Methyl-adenosine
  modified_base 37: mod_base = OTHER; note = 2'-O-Methyl-uridine
  modified_base 38: mod_base = OTHER; note = 2'-O-Methyl-adenosine
  modified_base 39: mod_base = OTHER; note = 2'-O-Methyl-guanosine
  modified_base 40: mod_base = OTHER; note = 2'-O-Methyl-cytidine
  modified_base 41: mod_base = OTHER; note = 2'-O-Methyl-adenosine
  modified_base 42: mod_base = OTHER; note = 2'-O-Methyl-adenosine
  modified_base 45: mod_base = OTHER; note = uridine phosphorothioate
  modified_base 46: mod_base = OTHER; note = 2'-O-Methyl-adenosine
  modified_base 48: mod_base = OTHER; note = 2'-O-Methyl-adenosine
  modified_base 50: mod_base = OTHER; note = 2'-O-Methyl-uridine
  modified_base 52: mod_base = OTHER; note = 2'-O-Methyl-adenosine
  modified_base 53: mod_base = OTHER; note = 2'-O-Methyl-guanosine
  modified_base 54: mod_base = OTHER; note = 2'-O-Methyl-guanosine
  modified_base 55: mod_base = OTHER; note = 2'-O-Methyl-cytidine
  modified_base 56: mod_base = OTHER; note = 2'-O-Methyl-uridine
  modified_base 57: mod_base = OTHER; note = 2'-O-Methyl-adenosine
  modified_base 60: mod_base = OTHER; note = 2'-O-Methyl-cytidine
  modified_base 61: mod_base = OTHER; note = 2'-O-Methyl-cytidine
  modified_base 64: mod_base = OTHER; note = uridine phosphorothioate
  modified_base 66: mod_base = OTHER; note = 2'-O-Methyl-uridine
  modified_base 67: mod_base = OTHER; note = 2'-O-Methyl-cytidine
  modified_base 70: mod_base = OTHER; note = 2'-O-Methyl-cytidine
  modified_base 71: mod_base = OTHER; note = 2'-O-Methyl-uridine
  modified_base 72: mod_base = OTHER; note = 2'-O-Methyl-uridine
  modified_base 74: mod_base = OTHER; note = 2'-O-Methyl-adenosine
  modified_base 75: mod_base = OTHER; note = 2'-O-Methyl-adenosine
  modified_base 76: mod_base = OTHER; note = 2'-O-Methyl-adenosine
  modified_base 77: mod_base = OTHER; note = 2'-O-Methyl-adenosine
  modified_base 78: mod_base = OTHER; note = 2'-O-Methyl-adenosine
  modified_base 79: mod_base = OTHER; note = 2'-O-Methyl-guanosine
  modified_base 80: mod_base = OTHER; note = 2'-O-Methyl-uridine
  modified_base 81: mod_base = OTHER; note = 2'-O-Methyl-guanosine
  modified_base 83: mod_base = OTHER; note = 2'-O-Methyl-cytidine
  modified_base 84: mod_base = OTHER; note = 2'-O-Methyl-adenosine
  modified_base 85: mod_base = OTHER; note = 2'-O-Methyl-cytidine
  modified_base 86: mod_base = OTHER; note = 2'-O-Methyl-cytidine
  modified_base 87: mod_base = OTHER; note = 2'-O-Methyl-guanosine
  modified_base 88: mod_base = OTHER; note = 2'-O-Methyl-adenosine
  modified_base 89: mod_base = OTHER; note = 2'-O-Methyl-guanosine
  modified_base 90: mod_base = OTHER; note = 2'-O-Methyl-uridine
  modified_base 91: mod_base = OTHER; note = 2'-O-Methyl-cytidine
  modified_base 92: mod_base = OTHER; note = 2'-O-Methyl-guanosine
  modified_base 93: mod_base = OTHER; note = 2'-O-Methyl-guanosine
  modified_base 94: mod_base = OTHER; note = 2'-O-Methyl-uridine
  modified_base 95: mod_base = OTHER; note = 2'-O-Methyl-guanosine
  modified_base 96: mod_base = OTHER; note = 2'-O-Methyl-cytidine
  modified_base 97: mod_base = OTHER; note = 2'-O-Methyl-uridine phosphorothioate
  modified_base 98: mod_base = OTHER; note = 2'-O-Methyl-uridine phosphorothioate
  modified_base 99: mod_base = OTHER; note = 2'-O-Methyl-uridine phosphorothioate
  modified_base 100: mod_base = OTHER; note = 2'-O-Methyl-uridine
  misc_difference 101: note = a, c, g, inosine, u, deoxyadenosine, deoxyguanosine, deoxycytidine, deoxyinosine, thymine, ribonebularine, 2'-O-methylnebularine, or 2'-deoxynebularine
  misc_difference 102: note = a, c, g, inosine, u, deoxyadenosine, deoxyguanosine, deoxycytidine, deoxyinosine, thymine, ribonebularine, 2'-O-methylnebularine, or 2'-deoxynebularine
  misc_difference 103: note = a, c, g, inosine, u, deoxyadenosine, deoxyguanosine, deoxycytidine, deoxyinosine, thymine, ribonebularine, 2'-O-methylnebularine, or 2'-deoxynebularine

SEQ ID NO: 2805 - RNA, 103 nt, synthetic construct; identical to SEQ ID NO: 1796
  source 1..103: mol_type = other RNA
  modified_base 1: mod_base = OTHER; note = 2'-O-Methyl-guanosine phosphorothioate
  modified_base 2: mod_base = OTHER; note = 2'-O-Methyl-adenosine phosphorothioate
  modified_base 3: mod_base = OTHER; note = 2'-O-Methyl-guanosine phosphorothioate
  modified_base 21: mod_base = OTHER; note = 2'-O-Methyl-guanosine
  modified_base 28: mod_base = OTHER; note = 2'-O-Methyl-adenosine
  modified_base 29: mod_base = OTHER; note = 2'-O-Methyl-guanosine
  modified_base 30: mod_base = OTHER; note = 2'-O-Methyl-cytidine
  modified_base 31: mod_base = OTHER; note = 2'-O-Methyl-uridine
  modified_base 32: mod_base = OTHER; note = 2'-O-Methyl-adenosine
  modified_base 33: mod_base = OTHER; note = 2'-O-Methyl-guanosine
  modified_base 34: mod_base = OTHER; note = 2'-O-Methyl-adenosine
  modified_base 35: mod_base = OTHER; note = 2'-O-Methyl-adenosine
  modified_base 36: mod_base = OTHER; note = 2'-O-Methyl-adenosine
  modified_base 37: mod_base = OTHER; note = 2'-O-Methyl-uridine
  modified_base 38: mod_base = OTHER; note = 2'-O-Methyl-adenosine
  modified_base 39: mod_base = OTHER; note = 2'-O-Methyl-guanosine
  modified_base 40: mod_base = OTHER; note = 2'-O-Methyl-cytidine
  modified_base 41: mod_base = OTHER; note = 2'-O-Methyl-adenosine
  modified_base 42: mod_base = OTHER; note = 2'-O-Methyl-adenosine
  modified_base 45: mod_base = OTHER; note = uridine phosphorothioate
  modified_base 46: mod_base = OTHER; note = 2'-O-Methyl-adenosine
  modified_base 48: mod_base = OTHER; note = 2'-O-Methyl-adenosine
  modified_base 50: mod_base = OTHER; note = 2'-O-Methyl-uridine
  modified_base 52: mod_base = OTHER; note = 2'-O-Methyl-adenosine
  modified_base 53: mod_base = OTHER; note = 2'-O-Methyl-guanosine
  modified_base 54: mod_base = OTHER; note = 2'-O-Methyl-guanosine
  modified_base 55: mod_base = OTHER; note = 2'-O-Methyl-cytidine
  modified_base 56: mod_base = OTHER; note = 2'-O-Methyl-uridine
  modified_base 57: mod_base = OTHER; note = 2'-O-Methyl-adenosine
  modified_base 60: mod_base = OTHER; note = 2'-O-Methyl-cytidine
  modified_base 61: mod_base = OTHER; note = 2'-O-Methyl-cytidine
  modified_base 64: mod_base = OTHER; note = uridine phosphorothioate
  modified_base 66: mod_base = OTHER; note = 2'-O-Methyl-uridine
  modified_base 67: mod_base = OTHER; note = 2'-O-Methyl-cytidine
  modified_base 70: mod_base = OTHER; note = 2'-O-Methyl-cytidine
  modified_base 71: mod_base = OTHER; note = 2'-O-Methyl-uridine
  modified_base 72: mod_base = OTHER; note = 2'-O-Methyl-uridine
  modified_base 73: mod_base = OTHER; note = 2'-O-Methyl-guanosine
  modified_base 74: mod_base = OTHER; note = 2'-O-Methyl-adenosine
  modified_base 75: mod_base = OTHER; note = 2'-O-Methyl-adenosine
  modified_base 76: mod_base = OTHER; note = 2'-O-Methyl-adenosine
  modified_base 77: mod_base = OTHER; note = 2'-O-Methyl-adenosine
  modified_base 78: mod_base = OTHER; note = 2'-O-Methyl-adenosine
  modified_base 79: mod_base = OTHER; note = 2'-O-Methyl-guanosine
  modified_base 80: mod_base = OTHER; note = 2'-O-Methyl-uridine
  modified_base 81: mod_base = OTHER; note = 2'-O-Methyl-guanosine
  modified_base 83: mod_base = OTHER; note = 2'-O-Methyl-cytidine
  modified_base 84: mod_base = OTHER; note = 2'-O-Methyl-adenosine
  modified_base 85: mod_base = OTHER; note = 2'-O-Methyl-cytidine
  modified_base 86: mod_base = OTHER; note = 2'-O-Methyl-cytidine
  modified_base 87: mod_base = OTHER; note = 2'-O-Methyl-guanosine
  modified_base 88: mod_base = OTHER; note = 2'-O-Methyl-adenosine
  modified_base 89: mod_base = OTHER; note = 2'-O-Methyl-guanosine
  modified_base 90: mod_base = OTHER; note = 2'-O-Methyl-uridine
  modified_base 91: mod_base = OTHER; note = 2'-O-Methyl-cytidine
  modified_base 92: mod_base = OTHER; note = 2'-O-Methyl-guanosine
  modified_base 93: mod_base = OTHER; note = 2'-O-Methyl-guanosine
  modified_base 94: mod_base = OTHER; note = 2'-O-Methyl-uridine
  modified_base 95: mod_base = OTHER; note = 2'-O-Methyl-guanosine
  modified_base 96: mod_base = OTHER; note = 2'-O-Methyl-cytidine
  modified_base 97: mod_base = OTHER; note = 2'-O-Methyl-uridine phosphorothioate
  modified_base 98: mod_base = OTHER; note = 2'-O-Methyl-uridine phosphorothioate
  modified_base 99: mod_base = OTHER; note = 2'-O-Methyl-uridine phosphorothioate
  modified_base 100: mod_base = OTHER; note = 2'-O-Methyl-uridine
  misc_difference 101: note = a, c, g, inosine, u, deoxyadenosine, deoxyguanosine, deoxycytidine, deoxyinosine, thymine, ribonebularine, 2'-O-methylnebularine, or 2'-deoxynebularine
  misc_difference 102: note = a, c, g, inosine, u, deoxyadenosine, deoxyguanosine, deoxycytidine, deoxyinosine, thymine, ribonebularine, 2'-O-methylnebularine, or 2'-deoxynebularine
  misc_difference 103: note = a, c, g, inosine, u, deoxyadenosine, deoxyguanosine, deoxycytidine, deoxyinosine, thymine, ribonebularine, 2'-O-methylnebularine, or 2'-deoxynebularine

SEQ ID NO: 2806 - RNA, 103 nt, synthetic construct; identical to SEQ ID NO: 1796
  source 1..103: mol_type = other RNA
  modified_base 1: mod_base = OTHER; note = 2'-O-Methyl-guanosine phosphorothioate
  modified_base 2: mod_base = OTHER; note = 2'-O-Methyl-adenosine phosphorothioate
  modified_base 3: mod_base = OTHER; note = 2'-O-Methyl-guanosine phosphorothioate
  modified_base 21: mod_base = OTHER; note = 2'-O-Methyl-guanosine
  modified_base 28: mod_base = OTHER; note = 2'-O-Methyl-adenosine
  modified_base 29: mod_base = OTHER; note = 2'-O-Methyl-guanosine
  modified_base 30: mod_base = OTHER; note = 2'-O-Methyl-cytidine
  modified_base 31: mod_base = OTHER; note = 2'-O-Methyl-uridine
  modified_base 32: mod_base = OTHER; note = 2'-O-Methyl-adenosine
  modified_base 34: mod_base = OTHER; note = 2'-O-Methyl-adenosine
  modified_base 35: mod_base = OTHER; note = 2'-O-Methyl-adenosine
  modified_base 36: mod_base = OTHER; note = 2'-O-Methyl-adenosine
  modified_base 37: mod_base = OTHER; note = 2'-O-Methyl-uridine
  modified_base 38: mod_base = OTHER; note = 2'-O-Methyl-adenosine
  modified_base 39: mod_base = OTHER; note = 2'-O-Methyl-guanosine
  modified_base 40: mod_base = OTHER; note = 2'-O-Methyl-cytidine
  modified_base 41: mod_base = OTHER; note = 2'-O-Methyl-adenosine
  modified_base 42: mod_base = OTHER; note = 2'-O-Methyl-adenosine
  modified_base 45: mod_base = OTHER; note = uridine phosphorothioate
  modified_base 46: mod_base = OTHER; note = 2'-O-Methyl-adenosine
  modified_base 48: mod_base = OTHER; note = 2'-O-Methyl-adenosine
  modified_base 50: mod_base = OTHER; note = 2'-O-Methyl-uridine
  modified_base 52: mod_base = OTHER; note = 2'-O-Methyl-adenosine
  modified_base 53: mod_base = OTHER; note = 2'-O-Methyl-guanosine
  modified_base 54: mod_base = OTHER; note = 2'-O-Methyl-guanosine
  modified_base 55: mod_base = OTHER; note = 2'-O-Methyl-cytidine
  modified_base 56: mod_base = OTHER; note = 2'-O-Methyl-uridine
  modified_base 57: mod_base = OTHER; note = 2'-O-Methyl-adenosine
  modified_base 60: mod_base = OTHER; note = 2'-O-Methyl-cytidine
  modified_base 61: mod_base = OTHER; note = 2'-O-Methyl-cytidine
  modified_base 64: mod_base = OTHER; note = uridine phosphorothioate
  modified_base 66: mod_base = OTHER; note = 2'-O-Methyl-uridine
  modified_base 67: mod_base = OTHER; note = 2'-O-Methyl-cytidine
  modified_base 70: mod_base = OTHER; note = 2'-O-Methyl-cytidine
  modified_base 71: mod_base = OTHER; note = 2'-O-Methyl-uridine
  modified_base 72: mod_base = OTHER; note = 2'-O-Methyl-uridine
  modified_base 74: mod_base = OTHER; note = 2'-O-Methyl-adenosine
  modified_base 75: mod_base = OTHER; note = 2'-O-Methyl-adenosine
  modified_base 76: mod_base = OTHER; note = 2'-O-Methyl-adenosine
  modified_base 77: mod_base = OTHER; note = 2'-O-Methyl-adenosine
  modified_base 78: mod_base = OTHER; note = 2'-O-Methyl-adenosine
  modified_base 79: mod_base = OTHER; note = 2'-O-Methyl-guanosine
  modified_base 80: mod_base = OTHER; note = 2'-O-Methyl-uridine
  modified_base 81: mod_base = OTHER; note = 2'-O-Methyl-guanosine
  modified_base 83: mod_base = OTHER; note = 2'-O-Methyl-cytidine
  modified_base 84: mod_base = OTHER; note = 2'-O-Methyl-adenosine
  modified_base 85: mod_base = OTHER; note = 2'-O-Methyl-cytidine
  modified_base 86: mod_base = OTHER; note = 2'-O-Methyl-cytidine
  modified_base 87: mod_base = OTHER; note = 2'-O-Methyl-guanosine
  modified_base 88: mod_base = OTHER; note = 2'-O-Methyl-adenosine
  modified_base 89: mod_base = OTHER; note = 2'-O-Methyl-guanosine
  modified_base 90: mod_base = OTHER; note = 2'-O-Methyl-uridine
  modified_base 91: mod_base = OTHER; note = 2'-O-Methyl-cytidine
  modified_base 92: mod_base = OTHER; note = 2'-O-Methyl-guanosine
  modified_base 93: mod_base = OTHER; note = 2'-O-Methyl-guanosine
  modified_base 94: mod_base = OTHER; note = 2'-O-Methyl-uridine
  modified_base 95: mod_base = OTHER; note = 2'-O-Methyl-guanosine
  modified_base 96: mod_base = OTHER; note = 2'-O-Methyl-cytidine
  modified_base 97: mod_base = OTHER; note = 2'-O-Methyl-uridine phosphorothioate
  modified_base 98: mod_base = OTHER; note = 2'-O-Methyl-uridine phosphorothioate
  modified_base 99: mod_base = OTHER; note = 2'-O-Methyl-uridine phosphorothioate
  modified_base 100: mod_base = OTHER; note = 2'-O-Methyl-uridine
  misc_difference 101: note = a, c, g, inosine, u, deoxyadenosine, deoxyguanosine, deoxycytidine, deoxyinosine, thymine, ribonebularine, 2'-O-methylnebularine, or 2'-deoxynebularine
  misc_difference 102: note = a, c, g, inosine, u, deoxyadenosine, deoxyguanosine, deoxycytidine, deoxyinosine, thymine, ribonebularine, 2'-O-methylnebularine, or 2'-deoxynebularine
  misc_difference 103: note = a, c, g, inosine, u, deoxyadenosine, deoxyguanosine, deoxycytidine, deoxyinosine, thymine, ribonebularine, 2'-O-methylnebularine, or 2'-deoxynebularine

SEQ ID NO: 2807 - RNA, 103 nt, synthetic construct; identical to SEQ ID NO: 1797
  source 1..103: mol_type = other RNA
  modified_base 1: mod_base = OTHER; note = 2'-O-Methyl-cytidine phosphorothioate
  modified_base 2: mod_base = OTHER; note = 2'-O-Methyl-adenosine phosphorothioate
  modified_base 3: mod_base = OTHER; note = 2'-O-Methyl-guanosine phosphorothioate
  modified_base 21: mod_base = OTHER; note = 2'-O-Methyl-guanosine
  modified_base 28: mod_base = OTHER; note = 2'-O-Methyl-adenosine
  modified_base 29: mod_base = OTHER; note = 2'-O-Methyl-guanosine
  modified_base 30: mod_base = OTHER; note = 2'-O-Methyl-cytidine
  modified_base 31: mod_base = OTHER; note = 2'-O-Methyl-uridine
  modified_base 32: mod_base = OTHER; note = 2'-O-Methyl-adenosine
  modified_base 33: mod_base = OTHER; note = 2'-O-Methyl-guanosine
  modified_base 34: mod_base = OTHER; note = 2'-O-Methyl-adenosine
  modified_base 35: mod_base = OTHER; note = 2'-O-Methyl-adenosine
  modified_base 36: mod_base = OTHER; note = 2'-O-Methyl-adenosine
  modified_base 37: mod_base = OTHER; note = 2'-O-Methyl-uridine
  modified_base 38: mod_base = OTHER; note = 2'-O-Methyl-adenosine
  modified_base 39: mod_base = OTHER; note = 2'-O-Methyl-guanosine
  modified_base 40: mod_base = OTHER; note = 2'-O-Methyl-cytidine
  modified_base 41: mod_base = OTHER; note = 2'-O-Methyl-adenosine
  modified_base 42: mod_base = OTHER; note = 2'-O-Methyl-adenosine
  modified_base 45: mod_base = OTHER; note = uridine phosphorothioate
  modified_base 46: mod_base = OTHER; note = 2'-O-Methyl-adenosine
  modified_base 48: mod_base = OTHER; note = 2'-O-Methyl-adenosine
  modified_base 50: mod_base = OTHER; note = 2'-O-Methyl-uridine
  modified_base 52: mod_base = OTHER; note = 2'-O-Methyl-adenosine
  modified_base 53: mod_base = OTHER; note = 2'-O-Methyl-guanosine
  modified_base 54: mod_base = OTHER; note = 2'-O-Methyl-guanosine
  modified_base 57: mod_base = OTHER; note = 2'-O-Methyl-adenosine
  modified_base 61: mod_base = OTHER; note = 2'-O-Methyl-cytidine
  modified_base 64: mod_base = OTHER; note = uridine phosphorothioate
  modified_base 66: mod_base = OTHER; note = 2'-O-Methyl-uridine
  modified_base 67: mod_base = OTHER; note = 2'-O-Methyl-cytidine
  modified_base 70: mod_base = OTHER; note = 2'-O-Methyl-cytidine
  modified_base 71: mod_base = OTHER; note = 2'-O-Methyl-uridine
  modified_base 72: mod_base = OTHER; note = 2'-O-Methyl-uridine
  modified_base 74: mod_base = OTHER; note = 2'-O-Methyl-adenosine
  modified_base 75: mod_base = OTHER; note = 2'-O-Methyl-adenosine
  modified_base 76: mod_base = OTHER; note = 2'-O-Methyl-adenosine
  modified_base 77: mod_base = OTHER; note = 2'-O-Methyl-adenosine
  modified_base 78: mod_base = OTHER; note = 2'-O-Methyl-adenosine
  modified_base 79: mod_base = OTHER; note = 2'-O-Methyl-guanosine
  modified_base 80: mod_base = OTHER; note = 2'-O-Methyl-uridine
  modified_base 82: mod_base = OTHER; note = 2'-O-Methyl-guanosine
  modified_base 83: mod_base = OTHER; note = 2'-O-Methyl-cytidine
  modified_base 84: mod_base = OTHER; note = 2'-O-Methyl-adenosine
  modified_base 85: mod_base = OTHER; note = 2'-O-Methyl-cytidine
  modified_base 86: mod_base = OTHER; note = 2'-O-Methyl-cytidine
  modified_base 87: mod_base = OTHER; note = 2'-O-Methyl-guanosine
  modified_base 89: mod_base = OTHER; note = 2'-O-Methyl-guanosine
  modified_base 92: mod_base = OTHER; note = 2'-O-Methyl-guanosine
  modified_base 93: mod_base = OTHER; note = 2'-O-Methyl-guanosine
  modified_base 94: mod_base = OTHER; note = 2'-O-Methyl-uridine
  modified_base 95: mod_base = OTHER; note = 2'-O-Methyl-guanosine
  modified_base 96: mod_base = OTHER; note = 2'-O-Methyl-cytidine
  modified_base 97: mod_base = OTHER; note = 2'-O-Methyl-uridine phosphorothioate
  modified_base 98: mod_base = OTHER; note = 2'-O-Methyl-uridine phosphorothioate
  modified_base 99: mod_base = OTHER; note = 2'-O-Methyl-uridine phosphorothioate
  modified_base 100: mod_base = OTHER; note = 2'-O-Methyl-uridine
  misc_difference 101: note = a, c, g, inosine, u, deoxyadenosine, deoxyguanosine, deoxycytidine, deoxyinosine, thymine, ribonebularine, 2'-O-methylnebularine, or 2'-deoxynebularine
  misc_difference 102: note = a, c, g, inosine, u, deoxyadenosine, deoxyguanosine, deoxycytidine, deoxyinosine, thymine, ribonebularine, 2'-O-methylnebularine, or 2'-deoxynebularine
  misc_difference 103: note = a, c, g, inosine, u, deoxyadenosine, deoxyguanosine, deoxycytidine, deoxyinosine, thymine, ribonebularine, 2'-O-methylnebularine, or 2'-deoxynebularine

SEQ ID NO: 2808 - RNA, 103 nt, synthetic construct; identical to SEQ ID NO: 1797
  source 1..103: mol_type = other RNA
  modified_base 1: mod_base = OTHER; note = 2'-O-Methyl-cytidine phosphorothioate
  modified_base 2: mod_base = OTHER; note = 2'-O-Methyl-adenosine phosphorothioate
  modified_base 3: mod_base = OTHER; note = 2'-O-Methyl-guanosine phosphorothioate
  modified_base 21: mod_base = OTHER; note = 2'-O-Methyl-guanosine
  modified_base 28: mod_base = OTHER; note = 2'-O-Methyl-adenosine
  modified_base 29: mod_base = OTHER; note = 2'-O-Methyl-guanosine
  modified_base 30: mod_base = OTHER; note = 2'-O-Methyl-cytidine
  modified_base 31: mod_base = OTHER; note = 2'-O-Methyl-uridine
  modified_base 32: mod_base = OTHER; note = 2'-O-Methyl-adenosine
  modified_base 33: mod_base = OTHER; note = 2'-O-Methyl-guanosine
  modified_base 34: mod_base = OTHER; note = 2'-O-Methyl-adenosine
  modified_base 35: mod_base = OTHER; note = 2'-O-Methyl-adenosine
  modified_base 36: mod_base = OTHER; note = 2'-O-Methyl-adenosine
  modified_base 37: mod_base = OTHER; note = 2'-O-Methyl-uridine
  modified_base 38: mod_base = OTHER; note = 2'-O-Methyl-adenosine
  modified_base 39: mod_base = OTHER; note = 2'-O-Methyl-guanosine
  modified_base 40: mod_base = OTHER; note = 2'-O-Methyl-cytidine
  modified_base 41: mod_base = OTHER; note = 2'-O-Methyl-adenosine
  modified_base 42: mod_base = OTHER; note = 2'-O-Methyl-adenosine
  modified_base 45: mod_base = OTHER; note = uridine phosphorothioate
  modified_base 46: mod_base = OTHER; note = 2'-O-Methyl-adenosine
  modified_base 48: mod_base = OTHER; note = 2'-O-Methyl-adenosine
  modified_base 50: mod_base = OTHER; note = 2'-O-Methyl-uridine
  modified_base 52: mod_base = OTHER; note = 2'-O-Methyl-adenosine
  modified_base 53: mod_base = OTHER; note = 2'-O-Methyl-guanosine
  modified_base 54: mod_base = OTHER; note = 2'-O-Methyl-guanosine
  modified_base 55: mod_base = OTHER; note = 2'-O-Methyl-cytidine
  modified_base 56: mod_base = OTHER; note = 2'-O-Methyl-uridine
  modified_base 57: mod_base = OTHER; note = 2'-O-Methyl-adenosine
  modified_base 60: mod_base = OTHER; note = 2'-O-Methyl-cytidine
  modified_base 61: mod_base = OTHER; note = 2'-O-Methyl-cytidine
  modified_base 64: mod_base = OTHER; note = uridine phosphorothioate
  modified_base 66: mod_base = OTHER; note = 2'-O-Methyl-uridine
  modified_base 67: mod_base = OTHER; note = 2'-O-Methyl-cytidine
  modified_base 70: mod_base = OTHER; note = 2'-O-Methyl-cytidine
  modified_base 71: mod_base = OTHER; note = 2'-O-Methyl-uridine
  modified_base 72: mod_base = OTHER; note = 2'-O-Methyl-uridine
  modified_base 74: mod_base = OTHER; note = 2'-O-Methyl-adenosine
  modified_base 75: mod_base = OTHER; note = 2'-O-Methyl-adenosine
  modified_base 76: mod_base = OTHER; note = 2'-O-Methyl-adenosine
  modified_base 77: mod_base = OTHER; note = 2'-O-Methyl-adenosine
  modified_base 78: mod_base = OTHER; note = 2'-O-Methyl-adenosine
  modified_base 79: mod_base = OTHER; note = 2'-O-Methyl-guanosine
  modified_base 80: mod_base = OTHER; note = 2'-O-Methyl-uridine
  modified_base 82: mod_base = OTHER; note = 2'-O-Methyl-guanosine
  modified_base 83: mod_base = OTHER; note = 2'-O-Methyl-cytidine
  modified_base 84: mod_base = OTHER; note = 2'-O-Methyl-adenosine
  modified_base 85: mod_base = OTHER; note = 2'-O-Methyl-cytidine
  modified_base 86: mod_base = OTHER; note = 2'-O-Methyl-cytidine
  modified_base 87: mod_base = OTHER; note = 2'-O-Methyl-guanosine
  modified_base 89: mod_base = OTHER; note = 2'-O-Methyl-guanosine
  modified_base 92: mod_base = OTHER; note = 2'-O-Methyl-guanosine
  modified_base 93: mod_base = OTHER; note = 2'-O-Methyl-guanosine
  modified_base 94: mod_base = OTHER; note = 2'-O-Methyl-uridine
  modified_base 95: mod_base = OTHER; note = 2'-O-Methyl-guanosine
  modified_base 96: mod_base = OTHER; note = 2'-O-Methyl-cytidine
  modified_base 97: mod_base = OTHER; note = 2'-O-Methyl-uridine phosphorothioate
  modified_base 98: mod_base = OTHER; note = 2'-O-Methyl-uridine phosphorothioate
  modified_base 99: mod_base = OTHER; note = 2'-O-Methyl-uridine phosphorothioate
  modified_base 100: mod_base = OTHER; note = 2'-O-Methyl-uridine
  misc_difference 101: note = a, c, g, inosine, u, deoxyadenosine, deoxyguanosine, deoxycytidine, deoxyinosine, thymine, ribonebularine, 2'-O-methylnebularine, or 2'-deoxynebularine
  misc_difference 102: note = a, c, g, inosine, u, deoxyadenosine, deoxyguanosine, deoxycytidine, deoxyinosine, thymine, ribonebularine, 2'-O-methylnebularine, or 2'-deoxynebularine
  misc_difference 103: note = a, c, g, inosine, u, deoxyadenosine, deoxyguanosine, deoxycytidine, deoxyinosine, thymine, ribonebularine, 2'-O-methylnebularine, or 2'-deoxynebularine

SEQ ID NO: 2809 - RNA, 103 nt, synthetic construct; identical to SEQ ID NO: 1797
  source 1..103: mol_type = other RNA
  modified_base 1: mod_base = OTHER; note = 2'-O-Methyl-cytidine phosphorothioate
  modified_base 2: mod_base = OTHER; note = 2'-O-Methyl-adenosine phosphorothioate
  modified_base 3: mod_base = OTHER; note = 2'-O-Methyl-guanosine phosphorothioate
  modified_base 21: mod_base = OTHER; note = 2'-O-Methyl-guanosine
  modified_base 28: mod_base = OTHER; note = 2'-O-Methyl-adenosine
  modified_base 29: mod_base = OTHER; note = 2'-O-Methyl-guanosine
  modified_base 30: mod_base = OTHER; note = 2'-O-Methyl-cytidine
  modified_base 31: mod_base = OTHER; note = 2'-O-Methyl-uridine
  modified_base 32: mod_base = OTHER; note = 2'-O-Methyl-adenosine
  modified_base 33: mod_base = OTHER; note = 2'-O-Methyl-guanosine
  modified_base 34: mod_base = OTHER; note = 2'-O-Methyl-adenosine
  modified_base 35: mod_base = OTHER; note = 2'-O-Methyl-adenosine
  modified_base 36: mod_base = OTHER; note = 2'-O-Methyl-adenosine
  modified_base 37: mod_base = OTHER; note = 2'-O-Methyl-uridine
  modified_base 38: mod_base = OTHER; note = 2'-O-Methyl-adenosine
  modified_base 39: mod_base = OTHER; note = 2'-O-Methyl-guanosine
  modified_base 40: mod_base = OTHER; note = 2'-O-Methyl-cytidine
  modified_base 41: mod_base = OTHER; note = 2'-O-Methyl-adenosine
  modified_base 42: mod_base = OTHER; note = 2'-O-Methyl-adenosine
  modified_base 45: mod_base = OTHER; note = uridine phosphorothioate
  modified_base 46: mod_base = OTHER; note = 2'-O-Methyl-adenosine
  modified_base 48: mod_base = OTHER; note = 2'-O-Methyl-adenosine
  modified_base 50: mod_base = OTHER; note = 2'-O-Methyl-uridine
  modified_base 52: mod_base = OTHER; note = 2'-O-Methyl-adenosine
  modified_base 53: mod_base = OTHER; note = 2'-O-Methyl-guanosine
  modified_base 54: mod_base = OTHER; note = 2'-O-Methyl-guanosine
  modified_base 57: mod_base = OTHER; note = 2'-O-Methyl-adenosine
  modified_base 61: mod_base = OTHER; note = 2'-O-Methyl-cytidine
  modified_base 64: mod_base = OTHER; note = uridine phosphorothioate
  modified_base 66: mod_base = OTHER; note = 2'-O-Methyl-uridine
  modified_base 67: mod_base = OTHER; note = 2'-O-Methyl-cytidine
  modified_base 70: mod_base = OTHER; note = 2'-O-Methyl-cytidine
  modified_base 71: mod_base = OTHER; note = 2'-O-Methyl-uridine
  modified_base 72: mod_base = OTHER; note = 2'-O-Methyl-uridine
  modified_base 73: mod_base = OTHER; note = 2'-O-Methyl-guanosine
  modified_base 74: mod_base = OTHER; note = 2'-O-Methyl-adenosine
  modified_base 75: mod_base = OTHER; note = 2'-O-Methyl-adenosine
  modified_base 76: mod_base = OTHER; note = 2'-O-Methyl-adenosine
  modified_base 77: mod_base = OTHER; note = 2'-O-Methyl-adenosine
  modified_base 78: mod_base = OTHER; note = 2'-O-Methyl-adenosine
  modified_base 79: mod_base = OTHER; note = 2'-O-Methyl-guanosine
  modified_base 80: mod_base = OTHER; note = 2'-O-Methyl-uridine
  modified_base 82: mod_base = OTHER; note = 2'-O-Methyl-guanosine
  modified_base 83: mod_base = OTHER; note = 2'-O-Methyl-cytidine
  modified_base 84: mod_base = OTHER; note = 2'-O-Methyl-adenosine
  modified_base 85: mod_base = OTHER; note = 2'-O-Methyl-cytidine
  modified_base 86: mod_base = OTHER; note = 2'-O-Methyl-cytidine
  modified_base 87: mod_base = OTHER; note = 2'-O-Methyl-guanosine
  modified_base 89: mod_base = OTHER; note = 2'-O-Methyl-guanosine
  modified_base 92: mod_base = OTHER; note = 2'-O-Methyl-guanosine
  modified_base 93: mod_base = OTHER; note = 2'-O-Methyl-guanosine
  modified_base 94: mod_base = OTHER; note = 2'-O-Methyl-uridine
  modified_base 95: mod_base = OTHER; note = 2'-O-Methyl-guanosine
  modified_base 96: mod_base = OTHER; note = 2'-O-Methyl-cytidine
  modified_base 97: mod_base = OTHER; note = 2'-O-Methyl-uridine phosphorothioate
  modified_base 98: mod_base = OTHER; note = 2'-O-Methyl-uridine phosphorothioate
  modified_base 99: mod_base = OTHER; note = 2'-O-Methyl-uridine phosphorothioate
  modified_base 100: mod_base = OTHER; note = 2'-O-Methyl-uridine
  misc_difference 101: note = a, c, g, inosine, u, deoxyadenosine, deoxyguanosine, deoxycytidine, deoxyinosine, thymine, ribonebularine, 2'-O-methylnebularine, or 2'-deoxynebularine
  misc_difference 102: note = a, c, g, inosine, u, deoxyadenosine, deoxyguanosine, deoxycytidine, deoxyinosine, thymine, ribonebularine, 2'-O-methylnebularine, or 2'-deoxynebularine
  misc_difference 103: note = a, c, g, inosine, u, deoxyadenosine, deoxyguanosine, deoxycytidine, deoxyinosine, thymine, ribonebularine, 2'-O-methylnebularine, or 2'-deoxynebularine

SEQ ID NO: 2810 - RNA, 103 nt, synthetic construct; identical to SEQ ID NO: 1797
  source 1..103: mol_type = other RNA
  modified_base 1: mod_base = OTHER; note = 2'-O-Methyl-cytidine phosphorothioate
  modified_base 2: mod_base = OTHER; note = 2'-O-Methyl-adenosine phosphorothioate
  modified_base 3: mod_base = OTHER; note = 2'-O-Methyl-guanosine phosphorothioate
  modified_base 21: mod_base = OTHER; note = 2'-O-Methyl-guanosine
  modified_base 28: mod_base = OTHER; note = 2'-O-Methyl-adenosine
  modified_base 29: mod_base = OTHER; note = 2'-O-Methyl-guanosine
  modified_base 30: mod_base = OTHER; note = 2'-O-Methyl-cytidine
  modified_base 31: mod_base = OTHER; note = 2'-O-Methyl-uridine
  modified_base 32: mod_base = OTHER; note = 2'-O-Methyl-adenosine
  modified_base 33: mod_base = OTHER; note = 2'-O-Methyl-guanosine
  modified_base 34: mod_base = OTHER; note = 2'-O-Methyl-adenosine
  modified_base 35: mod_base = OTHER; note = 2'-O-Methyl-adenosine
  modified_base 36: mod_base = OTHER; note = 2'-O-Methyl-adenosine
  modified_base 37: mod_base = OTHER; note = 2'-O-Methyl-uridine
  modified_base 38: mod_base = OTHER; note = 2'-O-Methyl-adenosine
  modified_base 39: mod_base = OTHER; note = 2'-O-Methyl-guanosine
  modified_base 40: mod_base = OTHER; note = 2'-O-Methyl-cytidine
  modified_base 41: mod_base = OTHER; note = 2'-O-Methyl-adenosine
  modified_base 42: mod_base = OTHER; note = 2'-O-Methyl-adenosine
  modified_base 45: mod_base = OTHER; note = uridine phosphorothioate
  modified_base 46: mod_base = OTHER; note = 2'-O-Methyl-adenosine
  modified_base 48: mod_base = OTHER; note = 2'-O-Methyl-adenosine
  modified_base 50: mod_base = OTHER; note = 2'-O-Methyl-uridine
  modified_base 52: mod_base = OTHER; note = 2'-O-Methyl-adenosine
  modified_base 53: mod_base = OTHER; note = 2'-O-Methyl-guanosine
  modified_base 54: mod_base = OTHER; note = 2'-O-Methyl-guanosine
  modified_base 57: mod_base = OTHER; note = 2'-O-Methyl-adenosine
  modified_base 61: mod_base = OTHER; note = 2'-O-Methyl-cytidine
  modified_base 64: mod_base = OTHER; note = uridine phosphorothioate
  modified_base 66: mod_base = OTHER; note = 2'-O-Methyl-uridine
  modified_base 67: mod_base = OTHER; note = 2'-O-Methyl-cytidine
  modified_base 70: mod_base = OTHER; note = 2'-O-Methyl-cytidine
  modified_base 71: mod_base = OTHER; note = 2'-O-Methyl-uridine
  modified_base 72: mod_base = OTHER; note = 2'-O-Methyl-uridine
  modified_base 73: mod_base = OTHER; note = 2'-O-Methyl-guanosine
  modified_base 74: mod_base = OTHER; note = 2'-O-Methyl-adenosine
  modified_base 75: mod_base = OTHER; note = 2'-O-Methyl-adenosine
  modified_base 76: mod_base = OTHER; note = 2'-O-Methyl-adenosine
  modified_base 77: mod_base = OTHER; note = 2'-O-Methyl-adenosine
  modified_base 78: mod_base = OTHER; note = 2'-O-Methyl-adenosine
  modified_base 79: mod_base = OTHER; note = 2'-O-Methyl-guanosine
  modified_base 80: mod_base = OTHER; note = 2'-O-Methyl-uridine
  modified_base 82: mod_base = OTHER; note = 2'-O-Methyl-guanosine
  modified_base 83: mod_base = OTHER; note = 2'-O-Methyl-cytidine
  modified_base 84: mod_base = OTHER; note = 2'-O-Methyl-adenosine
  modified_base 85: mod_base = OTHER; note = 2'-O-Methyl-cytidine
  modified_base 86: mod_base = OTHER; note = 2'-O-Methyl-cytidine
  modified_base 87: mod_base = OTHER; note = 2'-O-Methyl-guanosine
  modified_base 89: mod_base = OTHER; note = 2'-O-Methyl-guanosine
  modified_base 91: mod_base = OTHER; note = 2'-O-Methyl-cytidine
  modified_base 92: mod_base = OTHER; note = 2'-O-Methyl-guanosine
  modified_base 93: mod_base = OTHER; note = 2'-O-Methyl-guanosine
  modified_base 94: mod_base = OTHER; note = 2'-O-Methyl-uridine
  modified_base 95: mod_base = OTHER; note = 2'-O-Methyl-guanosine
  modified_base 96: mod_base = OTHER; note = 2'-O-Methyl-cytidine
  modified_base 97: mod_base = OTHER; note = 2'-O-Methyl-uridine phosphorothioate
  modified_base 98: mod_base = OTHER; note = 2'-O-Methyl-uridine phosphorothioate
  modified_base 99: mod_base = OTHER; note = 2'-O-Methyl-uridine phosphorothioate
  modified_base 100: mod_base = OTHER; note = 2'-O-Methyl-uridine
  misc_difference 101: note = a, c, g, inosine, u, deoxyadenosine, deoxyguanosine, deoxycytidine, deoxyinosine, thymine, ribonebularine, 2'-O-methylnebularine, or 2'-deoxynebularine
  misc_difference 102: note = a, c, g, inosine, u, deoxyadenosine, deoxyguanosine, deoxycytidine, deoxyinosine, thymine, ribonebularine, 2'-O-methylnebularine, or 2'-deoxynebularine
  misc_difference 103: note = a, c, g, inosine, u, deoxyadenosine, deoxyguanosine, deoxycytidine, deoxyinosine, thymine, ribonebularine, 2'-O-methylnebularine, or 2'-deoxynebularine

SEQ ID NO: 2811 - RNA, 103 nt, synthetic construct; identical to SEQ ID NO: 1797
  source 1..103: mol_type = other RNA
  modified_base 1: mod_base = OTHER; note = 2'-O-Methyl-cytidine phosphorothioate
  modified_base 2: mod_base = OTHER; note = 2'-O-Methyl-adenosine phosphorothioate
  modified_base 3: mod_base = OTHER; note = 2'-O-Methyl-guanosine phosphorothioate
  modified_base 21: mod_base = OTHER; note = 2'-O-Methyl-guanosine
  modified_base 28: mod_base = OTHER; note = 2'-O-Methyl-adenosine
  modified_base 29: mod_base = OTHER; note = 2'-O-Methyl-guanosine
  modified_base 30: mod_base = OTHER; note = 2'-O-Methyl-cytidine
  modified_base 31: mod_base = OTHER; note = 2'-O-Methyl-uridine
  modified_base 32: mod_base = OTHER; note = 2'-O-Methyl-adenosine
  modified_base 34: mod_base = OTHER; note = 2'-O-Methyl-adenosine
  modified_base 35: mod_base = OTHER; note = 2'-O-Methyl-adenosine
  modified_base 36: mod_base = OTHER; note = 2'-O-Methyl-adenosine
  modified_base 37: mod_base = OTHER; note = 2'-O-Methyl-uridine
  modified_base 38: mod_base = OTHER; note = 2'-O-Methyl-adenosine
  modified_base 39: mod_base = OTHER; note = 2'-O-Methyl-guanosine
  modified_base 40: mod_base = OTHER; note = 2'-O-Methyl-cytidine
  modified_base 41: mod_base = OTHER; note = 2'-O-Methyl-adenosine
  modified_base 42: mod_base = OTHER; note = 2'-O-Methyl-adenosine
  modified_base 45: mod_base = OTHER; note = uridine phosphorothioate
  modified_base 46: mod_base = OTHER; note = 2'-O-Methyl-adenosine
  modified_base 48: mod_base = OTHER; note = 2'-O-Methyl-adenosine
  modified_base 50: mod_base = OTHER; note = 2'-O-Methyl-uridine
  modified_base 52: mod_base = OTHER; note = 2'-O-Methyl-adenosine
  modified_base 53: mod_base = OTHER; note = 2'-O-Methyl-guanosine
  modified_base 54: mod_base = OTHER; note = 2'-O-Methyl-guanosine
  modified_base 57: mod_base = OTHER; note = 2'-O-Methyl-adenosine
  modified_base 61: mod_base = OTHER; note = 2'-O-Methyl-cytidine
  modified_base 64: mod_base = OTHER; note = uridine phosphorothioate
  modified_base 66: mod_base = OTHER; note = 2'-O-Methyl-uridine
  modified_base 67: mod_base = OTHER; note = 2'-O-Methyl-cytidine
  modified_base 70: mod_base = OTHER; note = 2'-O-Methyl-cytidine
  modified_base 71: mod_base = OTHER; note = 2'-O-Methyl-uridine
  modified_base 72: mod_base = OTHER; note = 2'-O-Methyl-uridine
  modified_base 73: mod_base = OTHER; note = 2'-O-Methyl-guanosine
  modified_base 74: mod_base = OTHER; note = 2'-O-Methyl-adenosine
  modified_base 75: mod_base = OTHER; note = 2'-O-Methyl-adenosine
  modified_base 76: mod_base = OTHER; note = 2'-O-Methyl-adenosine
  modified_base 77: mod_base = OTHER; note = 2'-O-Methyl-adenosine
  modified_base 78: mod_base = OTHER; note = 2'-O-Methyl-adenosine
  modified_base 79: mod_base = OTHER; note = 2'-O-Methyl-guanosine
  modified_base 80: mod_base = OTHER; note = 2'-O-Methyl-uridine
  modified_base 82: mod_base = OTHER; note = 2'-O-Methyl-guanosine
  modified_base 83: mod_base = OTHER; note = 2'-O-Methyl-cytidine
  modified_base 84: mod_base = OTHER; note = 2'-O-Methyl-adenosine
  modified_base 85: mod_base = OTHER; note = 2'-O-Methyl-cytidine
  modified_base 86: mod_base = OTHER; note = 2'-O-Methyl-cytidine
  modified_base 87: mod_base = OTHER; note = 2'-O-Methyl-guanosine
  modified_base 89: mod_base = OTHER; note = 2'-O-Methyl-guanosine
  modified_base 92: mod_base = OTHER; note = 2'-O-Methyl-guanosine
  modified_base 93: mod_base = OTHER; note = 2'-O-Methyl-guanosine
  modified_base 94: mod_base = OTHER; note = 2'-O-Methyl-uridine
  modified_base 95: mod_base = OTHER; note = 2'-O-Methyl-guanosine
  modified_base 96: mod_base = OTHER; note = 2'-O-Methyl-cytidine
  modified_base 97: mod_base = OTHER; note = 2'-O-Methyl-uridine phosphorothioate
  modified_base 98: mod_base = OTHER; note = 2'-O-Methyl-uridine phosphorothioate
  modified_base 99: mod_base = OTHER; note = 2'-O-Methyl-uridine phosphorothioate
  modified_base 100: mod_base = OTHER; note = 2'-O-Methyl-uridine
  misc_difference 101: note = a, c, g, inosine, u, deoxyadenosine, deoxyguanosine, deoxycytidine, deoxyinosine, thymine, ribonebularine, 2'-O-methylnebularine, or 2'-deoxynebularine
  misc_difference 102: note = a, c, g, inosine, u, deoxyadenosine, deoxyguanosine, deoxycytidine, deoxyinosine, thymine, ribonebularine, 2'-O-methylnebularine, or 2'-deoxynebularine
  misc_difference 103: note = a, c, g, inosine, u, deoxyadenosine, deoxyguanosine, deoxycytidine, deoxyinosine, thymine, ribonebularine, 2'-O-methylnebularine, or 2'-deoxynebularine

SEQ ID NO: 2812 - RNA, 103 nt, synthetic construct; identical to SEQ ID NO: 1797
  source 1..103: mol_type = other RNA
  modified_base 1: mod_base = OTHER; note = 2'-O-Methyl-cytidine phosphorothioate
  modified_base 2: mod_base = OTHER; note = 2'-O-Methyl-adenosine phosphorothioate
  modified_base 3: mod_base = OTHER; note = 2'-O-Methyl-guanosine phosphorothioate
  modified_base 21: mod_base = OTHER; note = 2'-O-Methyl-guanosine
  modified_base 28: mod_base = OTHER; note = 2'-O-Methyl-adenosine
  modified_base 29: mod_base = OTHER; note = 2'-O-Methyl-guanosine
  modified_base 30: mod_base = OTHER; note = 2'-O-Methyl-cytidine
  modified_base 31: mod_base = OTHER; note = 2'-O-Methyl-uridine
  modified_base 32: mod_base = OTHER; note = 2'-O-Methyl-adenosine
  modified_base 34: mod_base = OTHER; note = 2'-O-Methyl-adenosine
  modified_base 35: mod_base = OTHER; note = 2'-O-Methyl-adenosine
  modified_base 36: mod_base = OTHER; note = 2'-O-Methyl-adenosine
  modified_base 37: mod_base = OTHER; note = 2'-O-Methyl-uridine
  modified_base 38: mod_base = OTHER; note = 2'-O-Methyl-adenosine
  modified_base 39: mod_base = OTHER; note = 2'-O-Methyl-guanosine
  modified_base 40: mod_base = OTHER; note = 2'-O-Methyl-cytidine
  modified_base 41: mod_base = OTHER; note = 2'-O-Methyl-adenosine
  modified_base 42: mod_base = OTHER; note = 2'-O-Methyl-adenosine
  modified_base 45: mod_base = OTHER; note = uridine phosphorothioate
  modified_base 46: mod_base = OTHER; note = 2'-O-Methyl-adenosine
  modified_base 48: mod_base = OTHER; note = 2'-O-Methyl-adenosine
  modified_base 50: mod_base = OTHER; note = 2'-O-Methyl-uridine
  modified_base 52: mod_base = OTHER; note = 2'-O-Methyl-adenosine
  modified_base 53: mod_base = OTHER; note = 2'-O-Methyl-guanosine
  modified_base 54: mod_base = OTHER; note = 2'-O-Methyl-guanosine
  modified_base 57: mod_base = OTHER; note = 2'-O-Methyl-adenosine
  modified_base 61: mod_base = OTHER; note = 2'-O-Methyl-cytidine
  modified_base 64: mod_base = OTHER; note = uridine phosphorothioate
  modified_base 66: mod_base = OTHER; note = 2'-O-Methyl-uridine
  modified_base 67: mod_base = OTHER; note = 2'-O-Methyl-cytidine
  modified_base 70: mod_base = OTHER; note = 2'-O-Methyl-cytidine
  modified_base 71: mod_base = OTHER; note = 2'-O-Methyl-uridine
  modified_base 72: mod_base = OTHER; note = 2'-O-Methyl-uridine
  modified_base 73: mod_base = OTHER; note = 2'-O-Methyl-guanosine
  modified_base 74: mod_base = OTHER; note = 2'-O-Methyl-adenosine
  modified_base 75: mod_base = OTHER; note = 2'-O-Methyl-adenosine
  modified_base 76: mod_base = OTHER; note = 2'-O-Methyl-adenosine
  modified_base 77: mod_base = OTHER; note = 2'-O-Methyl-adenosine
  modified_base 78: mod_base = OTHER; note = 2'-O-Methyl-adenosine
  modified_base 79: mod_base = OTHER; note = 2'-O-Methyl-guanosine
  modified_base 80: mod_base = OTHER; note = 2'-O-Methyl-uridine
  modified_base 82: mod_base = OTHER; note = 2'-O-Methyl-guanosine
  modified_base 83: mod_base = OTHER; note = 2'-O-Methyl-cytidine
  modified_base 84: mod_base = OTHER; note = 2'-O-Methyl-adenosine
  modified_base 85: mod_base = OTHER; note = 2'-O-Methyl-cytidine
  modified_base 86: mod_base = OTHER; note = 2'-O-Methyl-cytidine
  modified_base 87: mod_base = OTHER; note = 2'-O-Methyl-guanosine
  modified_base 89: mod_base = OTHER; note = 2'-O-Methyl-guanosine
  modified_base 91: mod_base = OTHER; note = 2'-O-Methyl-cytidine
  modified_base 92: mod_base = OTHER; note = 2'-O-Methyl-guanosine
  modified_base 93: mod_base = OTHER; note = 2'-O-Methyl-guanosine
  modified_base 94: mod_base = OTHER; note = 2'-O-Methyl-uridine
  modified_base 95: mod_base = OTHER; note = 2'-O-Methyl-guanosine
  modified_base 96: mod_base = OTHER; note = 2'-O-Methyl-cytidine
  modified_base 97: mod_base = OTHER; note = 2'-O-Methyl-uridine phosphorothioate
  modified_base 98: mod_base = OTHER; note = 2'-O-Methyl-uridine phosphorothioate
  modified_base 99: mod_base = OTHER; note = 2'-O-Methyl-uridine phosphorothioate
  modified_base 100: mod_base = OTHER; note = 2'-O-Methyl-uridine
  misc_difference 101: note = a, c, g, inosine, u, deoxyadenosine, deoxyguanosine, deoxycytidine, deoxyinosine, thymine, ribonebularine, 2'-O-methylnebularine, or 2'-deoxynebularine
  misc_difference 102: note = a, c, g, inosine, u, deoxyadenosine, deoxyguanosine, deoxycytidine, deoxyinosine, thymine, ribonebularine, 2'-O-methylnebularine, or 2'-deoxynebularine
  misc_difference 103: note = a, c, g, inosine, u, deoxyadenosine, deoxyguanosine, deoxycytidine, deoxyinosine, thymine, ribonebularine, 2'-O-methylnebularine, or 2'-deoxynebularine

SEQ ID NO: 2813 - RNA, 103 nt, synthetic construct; identical to SEQ ID NO: 1797
  source 1..103: mol_type = other RNA
  modified_base 1: mod_base = OTHER; note = 2'-O-Methyl-cytidine phosphorothioate
  modified_base 2: mod_base = OTHER; note = 2'-O-Methyl-adenosine phosphorothioate
  modified_base 3: mod_base = OTHER; note = 2'-O-Methyl-guanosine phosphorothioate
  modified_base 21: mod_base = OTHER; note = 2'-O-Methyl-guanosine
  modified_base 28: mod_base = OTHER; note = 2'-O-Methyl-adenosine
  modified_base 29: mod_base = OTHER; note = 2'-O-Methyl-guanosine
  modified_base 30: mod_base = OTHER; note = 2'-O-Methyl-cytidine
  modified_base 31: mod_base = OTHER; note = 2'-O-Methyl-uridine
  modified_base 32: mod_base = OTHER; note = 2'-O-Methyl-adenosine
  modified_base 34: mod_base = OTHER; note = 2'-O-Methyl-adenosine
  modified_base 35: mod_base = OTHER; note = 2'-O-Methyl-adenosine
  modified_base 36: mod_base = OTHER; note = 2'-O-Methyl-adenosine
  modified_base 37: mod_base = OTHER; note = 2'-O-Methyl-uridine
  modified_base 38: mod_base = OTHER; note = 2'-O-Methyl-adenosine
  modified_base 39: mod_base = OTHER; note = 2'-O-Methyl-guanosine
  modified_base 40: mod_base = OTHER; note = 2'-O-Methyl-cytidine
  modified_base 41: mod_base = OTHER; note = 2'-O-Methyl-adenosine
  modified_base 42: mod_base = OTHER; note = 2'-O-Methyl-adenosine
  modified_base 45: mod_base = OTHER; note = uridine phosphorothioate
  modified_base 46: mod_base = OTHER; note = 2'-O-Methyl-adenosine
  modified_base 48: mod_base = OTHER; note = 2'-O-Methyl-adenosine
  modified_base 50: mod_base = OTHER; note = 2'-O-Methyl-uridine
  modified_base 52: mod_base = OTHER; note = 2'-O-Methyl-adenosine
  modified_base 53: mod_base = OTHER; note = 2'-O-Methyl-guanosine
  modified_base 54: mod_base = OTHER; note = 2'-O-Methyl-guanosine
  modified_base 55: mod_base = OTHER; note = 2'-O-Methyl-cytidine
  modified_base 56: mod_base = OTHER; note = 2'-O-Methyl-uridine
  modified_base 57: mod_base = OTHER; note = 2'-O-Methyl-adenosine
  modified_base 60: mod_base = OTHER; note = 2'-O-Methyl-cytidine
  modified_base 61: mod_base = OTHER; note = 2'-O-Methyl-cytidine
  modified_base 64: mod_base = OTHER; note = uridine phosphorothioate
  modified_base 66: mod_base = OTHER; note = 2'-O-Methyl-uridine
  modified_base 67: mod_base = OTHER; note = 2'-O-Methyl-cytidine
  modified_base 70: mod_base = OTHER; note = 2'-O-Methyl-cytidine
  modified_base 71: mod_base = OTHER; note = 2'-O-Methyl-uridine
  modified_base 72: mod_base = OTHER; note = 2'-O-Methyl-uridine
  modified_base 74: mod_base = OTHER; note = 2'-O-Methyl-adenosine
  modified_base 75: mod_base = OTHER; note = 2'-O-Methyl-adenosine
  modified_base 76: mod_base = OTHER; note = 2'-O-Methyl-adenosine
  modified_base 77: mod_base = OTHER; note = 2'-O-Methyl-adenosine
  modified_base 78: mod_base = OTHER; note = 2'-O-Methyl-adenosine
  modified_base 79: mod_base = OTHER; note = 2'-O-Methyl-guanosine
  modified_base 80: mod_base = OTHER; note = 2'-O-Methyl-uridine
  modified_base 82: mod_base = OTHER; note = 2'-O-Methyl-guanosine
  modified_base 83: mod_base = OTHER; note = 2'-O-Methyl-cytidine
  modified_base 84: mod_base = OTHER; note = 2'-O-Methyl-adenosine
  modified_base 85: mod_base = OTHER; note = 2'-O-Methyl-cytidine
  modified_base 86: mod_base = OTHER; note = 2'-O-Methyl-cytidine
  modified_base 87: mod_base = OTHER; note = 2'-O-Methyl-guanosine
  modified_base 89: mod_base = OTHER; note = 2'-O-Methyl-guanosine
  modified_base 92: mod_base = OTHER; note = 2'-O-Methyl-guanosine
  modified_base 93: mod_base = OTHER; note = 2'-O-Methyl-guanosine
  modified_base 94: mod_base = OTHER; note = 2'-O-Methyl-uridine
  modified_base 95: mod_base = OTHER; note = 2'-O-Methyl-guanosine
  modified_base 96: mod_base = OTHER; note = 2'-O-Methyl-cytidine
  modified_base 97: mod_base = OTHER; note = 2'-O-Methyl-uridine phosphorothioate
  modified_base 98: mod_base = OTHER; note = 2'-O-Methyl-uridine phosphorothioate
  modified_base 99: mod_base = OTHER; note = 2'-O-Methyl-uridine phosphorothioate
  modified_base 100: mod_base = OTHER; note = 2'-O-Methyl-uridine
  misc_difference 101: note = a, c, g, inosine, u, deoxyadenosine, deoxyguanosine, deoxycytidine, deoxyinosine, thymine, ribonebularine, 2'-O-methylnebularine, or 2'-deoxynebularine
  misc_difference 102: note = a, c, g, inosine, u, deoxyadenosine, deoxyguanosine, deoxycytidine, deoxyinosine, thymine, ribonebularine, 2'-O-methylnebularine, or 2'-deoxynebularine
  misc_difference 103: note = a, c, g, inosine, u, deoxyadenosine, deoxyguanosine, deoxycytidine, deoxyinosine, thymine, ribonebularine, 2'-O-methylnebularine, or 2'-deoxynebularine

SEQ ID NO: 2814 - RNA, 103 nt, synthetic construct; identical to SEQ ID NO: 1795
  source 1..103: mol_type = other RNA
  modified_base 1: mod_base = OTHER; note = 2'-O-Methyl-cytidine phosphorothioate
  modified_base 2: mod_base = OTHER; note = 2'-O-Methyl-cytidine phosphorothioate
  modified_base 3: mod_base = OTHER; note = 2'-O-Methyl-cytidine phosphorothioate
  modified_base 21: mod_base = OTHER; note = 2'-O-Methyl-guanosine
  modified_base 25: mod_base = OTHER; note = uridine phosphorothioate
  modified_base 28: mod_base = OTHER; note = 2'-O-Methyl-adenosine
  modified_base 29: mod_base = OTHER; note = 2'-O-Methyl-guanosine
  modified_base 30: mod_base = OTHER; note = 2'-O-Methyl-cytidine
  modified_base 31: mod_base = OTHER; note = 2'-O-Methyl-uridine
  modified_base 32: mod_base = OTHER; note = 2'-O-Methyl-adenosine
  modified_base 33: mod_base = OTHER; note = 2'-O-Methyl-guanosine
  modified_base 34: mod_base = OTHER; note = 2'-O-Methyl-adenosine
  modified_base 35: mod_base = OTHER; note = 2'-O-Methyl-adenosine
  modified_base 36: mod_base = OTHER; note = 2'-O-Methyl-adenosine
  modified_base 37: mod_base = OTHER; note = 2'-O-Methyl-uridine
  modified_base 38: mod_base = OTHER; note = 2'-O-Methyl-adenosine
  modified_base 39: mod_base = OTHER; note = 2'-O-Methyl-guanosine
  modified_base 40: mod_base = OTHER; note = 2'-O-Methyl-cytidine
  modified_base 41: mod_base = OTHER; note = 2'-O-Methyl-adenosine
  modified_base 42: mod_base = OTHER; note = 2'-O-Methyl-adenosine
  modified_base 45: mod_base = OTHER; note = uridine phosphorothioate
  modified_base 46: mod_base = OTHER; note = 2'-O-Methyl-adenosine
  modified_base 48: mod_base = OTHER; note = 2'-O-Methyl-adenosine
  modified_base 50: mod_base = OTHER; note = 2'-O-Methyl-uridine
  modified_base 52: mod_base = OTHER; note = 2'-O-Methyl-adenosine
  modified_base 53: mod_base = OTHER; note = 2'-O-Methyl-guanosine
  modified_base 54: mod_base = OTHER; note = 2'-O-Methyl-guanosine
  modified_base 55: mod_base = OTHER; note = 2'-O-Methyl-cytidine
  modified_base 56: mod_base = OTHER; note = 2'-O-Methyl-uridine
  modified_base 57: mod_base = OTHER; note = 2'-O-Methyl-adenosine
  modified_base 60: mod_base = OTHER; note = 2'-O-Methyl-cytidine
  modified_base 61: mod_base = OTHER; note = 2'-O-Methyl-cytidine
  modified_base 66: mod_base = OTHER; note = 2'-O-Methyl-uridine
  modified_base 67: mod_base = OTHER; note = 2'-O-Methyl-cytidine
  modified_base 70: mod_base = OTHER; note = 2'-O-Methyl-cytidine
  modified_base 71: mod_base = OTHER; note = 2'-O-Methyl-uridine
  modified_base 72: mod_base = OTHER; note = 2'-O-Methyl-uridine
  modified_base 73: mod_base = OTHER; note = 2'-O-Methyl-guanosine
  modified_base 74: mod_base = OTHER; note = 2'-O-Methyl-adenosine
  modified_base 75: mod_base = OTHER; note = 2'-O-Methyl-adenosine
  modified_base 76: mod_base = OTHER; note = 2'-O-Methyl-adenosine
  modified_base 77: mod_base = OTHER; note = 2'-O-Methyl-adenosine
  modified_base 78: mod_base = OTHER; note = 2'-O-Methyl-adenosine
  modified_base 79: mod_base = OTHER; note = 2'-O-Methyl-guanosine
  modified_base 80: mod_base = OTHER; note = 2'-O-Methyl-uridine
  modified_base 81: mod_base = OTHER; note = 2'-O-Methyl-guanosine
  modified_base 83: mod_base = OTHER; note = 2'-O-Methyl-cytidine
  modified_base 84: mod_base = OTHER; note = 2'-O-Methyl-adenosine
  modified_base 85: mod_base = OTHER; note = 2'-O-Methyl-cytidine
  modified_base 86: mod_base = OTHER; note = 2'-O-Methyl-cytidine
  modified_base 87: mod_base = OTHER; note = 2'-O-Methyl-guanosine
  modified_base 88: mod_base = OTHER; note = 2'-O-Methyl-adenosine
  modified_base 89: mod_base = OTHER; note = 2'-O-Methyl-guanosine
  modified_base 90: mod_base = OTHER; note = 2'-O-Methyl-uridine
  modified_base 91: mod_base = OTHER; note = 2'-O-Methyl-cytidine
  modified_base 92: mod_base = OTHER; note = 2'-O-Methyl-guanosine
  modified_base 93: mod_base = OTHER; note = 2'-O-Methyl-guanosine
  modified_base 94: mod_base = OTHER; note = 2'-O-Methyl-uridine
  modified_base 95: mod_base = OTHER; note = 2'-O-Methyl-guanosine
  modified_base 96: mod_base = OTHER; note = 2'-O-Methyl-cytidine
  modified_base 97: mod_base = OTHER; note = 2'-O-Methyl-uridine phosphorothioate
  modified_base 98: mod_base = OTHER; note = 2'-O-Methyl-uridine phosphorothioate
  modified_base 99: mod_base = OTHER; note = 2'-O-Methyl-uridine phosphorothioate
  modified_base 100: mod_base = OTHER; note = 2'-O-Methyl-uridine
  misc_difference 101: note = a, c, g, inosine, u, deoxyadenosine, deoxyguanosine, deoxycytidine, deoxyinosine, thymine, ribonebularine, 2'-O-methylnebularine, or 2'-deoxynebularine
  misc_difference 102: note = a, c, g, inosine, u, deoxyadenosine, deoxyguanosine, deoxycytidine, deoxyinosine, thymine, ribonebularine, 2'-O-methylnebularine, or 2'-deoxynebularine
  misc_difference 103: note = a, c, g, inosine, u, deoxyadenosine, deoxyguanosine, deoxycytidine, deoxyinosine, thymine, ribonebularine, 2'-O-methylnebularine, or 2'-deoxynebularine

SEQ ID NO: 2815 - RNA, 103 nt, synthetic construct; identical to SEQ ID NO: 1795
  source 1..103: mol_type = other RNA
  modified_base 1: mod_base = OTHER; note = 2'-O-Methyl-cytidine phosphorothioate
  modified_base 2: mod_base = OTHER; note = 2'-O-Methyl-cytidine phosphorothioate
  modified_base 3: mod_base = OTHER; note = 2'-O-Methyl-cytidine phosphorothioate
  modified_base 21: mod_base = OTHER; note = 2'-O-Methyl-guanosine
  modified_base 25: mod_base = OTHER; note = uridine phosphorothioate
  modified_base 28: mod_base = OTHER; note = 2'-O-Methyl-adenosine
  modified_base 29: mod_base = OTHER; note = 2'-O-Methyl-guanosine
  modified_base 30: mod_base = OTHER; note = 2'-O-Methyl-cytidine
  modified_base 31: mod_base = OTHER; note = 2'-O-Methyl-uridine
  modified_base 32: mod_base = OTHER; note = 2'-O-Methyl-adenosine
  modified_base 34: mod_base = OTHER; note = 2'-O-Methyl-adenosine
  modified_base 35: mod_base = OTHER; note = 2'-O-Methyl-adenosine
  modified_base 36: mod_base = OTHER; note = 2'-O-Methyl-adenosine
  modified_base 37: mod_base = OTHER; note = 2'-O-Methyl-uridine
  modified_base 38: mod_base = OTHER; note = 2'-O-Methyl-adenosine
  modified_base 39: mod_base = OTHER; note = 2'-O-Methyl-guanosine
  modified_base 40: mod_base = OTHER; note = 2'-O-Methyl-cytidine
  modified_base 41: mod_base = OTHER; note = 2'-O-Methyl-adenosine
  modified_base 42: mod_base = OTHER; note = 2'-O-Methyl-adenosine
  modified_base 45: mod_base = OTHER; note = uridine phosphorothioate
  modified_base 46: mod_base = OTHER; note = 2'-O-Methyl-adenosine
  modified_base 48: mod_base = OTHER; note = 2'-O-Methyl-adenosine
  modified_base 50: mod_base = OTHER; note = 2'-O-Methyl-uridine
  modified_base 52: mod_base = OTHER; note = 2'-O-Methyl-adenosine
  modified_base 53: mod_base = OTHER; note = 2'-O-Methyl-guanosine
  modified_base 54: mod_base = OTHER; note = 2'-O-Methyl-guanosine
  modified_base 55: mod_base = OTHER; note = 2'-O-Methyl-cytidine
  modified_base 56: mod_base = OTHER; note = 2'-O-Methyl-uridine
  modified_base 57: mod_base = OTHER; note = 2'-O-Methyl-adenosine
  modified_base 60: mod_base = OTHER; note = 2'-O-Methyl-cytidine
  modified_base 61: mod_base = OTHER; note = 2'-O-Methyl-cytidine
  modified_base 66: mod_base = OTHER; note = 2'-O-Methyl-uridine
  modified_base 67: mod_base = OTHER; note = 2'-O-Methyl-cytidine
  modified_base 70: mod_base = OTHER; note = 2'-O-Methyl-cytidine
  modified_base 71: mod_base = OTHER; note = 2'-O-Methyl-uridine
  modified_base 72: mod_base = OTHER; note = 2'-O-Methyl-uridine
  modified_base 74: mod_base = OTHER; note = 2'-O-Methyl-adenosine
  modified_base 75: mod_base = OTHER; note = 2'-O-Methyl-adenosine
  modified_base 76: mod_base = OTHER; note = 2'-O-Methyl-adenosine
  modified_base 77: mod_base = OTHER; note = 2'-O-Methyl-adenosine
  modified_base 78: mod_base = OTHER; note = 2'-O-Methyl-adenosine
  modified_base 79: mod_base = OTHER; note = 2'-O-Methyl-guanosine
  modified_base 80: mod_base = OTHER; note = 2'-O-Methyl-uridine
  modified_base 81: mod_base = OTHER; note = 2'-O-Methyl-guanosine
  modified_base 83: mod_base = OTHER; note = 2'-O-Methyl-cytidine
  modified_base 84: mod_base = OTHER; note = 2'-O-Methyl-adenosine
  modified_base 85: mod_base = OTHER; note = 2'-O-Methyl-cytidine
  modified_base 86: mod_base = OTHER; note = 2'-O-Methyl-cytidine
  modified_base 87: mod_base = OTHER; note = 2'-O-Methyl-guanosine
  modified_base 88: mod_base = OTHER; note = 2'-O-Methyl-adenosine
  modified_base 89: mod_base = OTHER; note = 2'-O-Methyl-guanosine
  modified_base 90: mod_base = OTHER; note = 2'-O-Methyl-uridine
  modified_base 91: mod_base = OTHER; note = 2'-O-Methyl-cytidine
  modified_base 92: mod_base = OTHER; note = 2'-O-Methyl-guanosine
  modified_base 93: mod_base = OTHER; note = 2'-O-Methyl-guanosine
  modified_base 94: mod_base = OTHER; note = 2'-O-Methyl-uridine
  modified_base 95: mod_base = OTHER; note = 2'-O-Methyl-guanosine
  modified_base 96: mod_base = OTHER; note = 2'-O-Methyl-cytidine
  modified_base 97: mod_base = OTHER; note = 2'-O-Methyl-uridine phosphorothioate
  modified_base 98: mod_base = OTHER; note = 2'-O-Methyl-uridine phosphorothioate
  modified_base 99: mod_base = OTHER; note = 2'-O-Methyl-uridine phosphorothioate
  modified_base 100: mod_base = OTHER; note = 2'-O-Methyl-uridine
  misc_difference 101: note = a, c, g, inosine, u, deoxyadenosine, deoxyguanosine, deoxycytidine, deoxyinosine, thymine, ribonebularine, 2'-O-methylnebularine, or 2'-deoxynebularine
  misc_difference 102: note = a, c, g, inosine, u, deoxyadenosine, deoxyguanosine, deoxycytidine, deoxyinosine, thymine, ribonebularine, 2'-O-methylnebularine, or 2'-deoxynebularine
  misc_difference 103: note = a, c, g, inosine, u, deoxyadenosine, deoxyguanosine, deoxycytidine, deoxyinosine, thymine, ribonebularine, 2'-O-methylnebularine, or 2'-deoxynebularine

SEQ ID NO: 2816 - RNA, 103 nt, synthetic construct; identical to SEQ ID NO: 1796
  source 1..103: mol_type = other RNA
  modified_base 1: mod_base = OTHER; note = 2'-O-Methyl-guanosine phosphorothioate
  modified_base 2: mod_base = OTHER; note = 2'-O-Methyl-adenosine phosphorothioate
  modified_base 3: mod_base = OTHER; note = 2'-O-Methyl-guanosine phosphorothioate
  modified_base 21: mod_base = OTHER; note = 2'-O-Methyl-guanosine
  modified_base 25: mod_base = OTHER; note = uridine phosphorothioate
  modified_base 28: mod_base = OTHER; note = 2'-O-Methyl-adenosine
  modified_base 29: mod_base = OTHER; note = 2'-O-Methyl-guanosine
  modified_base 30: mod_base = OTHER; note = 2'-O-Methyl-cytidine
  modified_base 31: mod_base = OTHER; note = 2'-O-Methyl-uridine
  modified_base 32: mod_base = OTHER; note = 2'-O-Methyl-adenosine
  modified_base 33: mod_base = OTHER; note = 2'-O-Methyl-guanosine
  modified_base 34: mod_base = OTHER; note = 2'-O-Methyl-adenosine
  modified_base 35: mod_base = OTHER; note = 2'-O-Methyl-adenosine
  modified_base 36: mod_base = OTHER; note = 2'-O-Methyl-adenosine
  modified_base 37: mod_base = OTHER; note = 2'-O-Methyl-uridine
  modified_base 38: mod_base = OTHER; note = 2'-O-Methyl-adenosine
  modified_base 39: mod_base = OTHER; note = 2'-O-Methyl-guanosine
  modified_base 40: mod_base = OTHER; note = 2'-O-Methyl-cytidine
  modified_base 41: mod_base = OTHER; note = 2'-O-Methyl-adenosine
  modified_base 42: mod_base = OTHER; note = 2'-O-Methyl-adenosine
  modified_base 45: mod_base = OTHER; note = uridine phosphorothioate
  modified_base 46: mod_base = OTHER; note = 2'-O-Methyl-adenosine
  modified_base 48: mod_base = OTHER; note = 2'-O-Methyl-adenosine
  modified_base 50: mod_base = OTHER; note = 2'-O-Methyl-uridine
  modified_base 52: mod_base = OTHER; note = 2'-O-Methyl-adenosine
  modified_base 53: mod_base = OTHER; note = 2'-O-Methyl-guanosine
  modified_base 54: mod_base = OTHER; note = 2'-O-Methyl-guanosine
  modified_base 55: mod_base = OTHER; note = 2'-O-Methyl-cytidine
  modified_base 56: mod_base = OTHER; note = 2'-O-Methyl-uridine
  modified_base 57: mod_base = OTHER; note = 2'-O-Methyl-adenosine
  modified_base 60: mod_base = OTHER; note = 2'-O-Methyl-cytidine
  modified_base 61: mod_base = OTHER; note = 2'-O-Methyl-cytidine
  modified_base 66: mod_base = OTHER; note = 2'-O-Methyl-uridine
  modified_base 67: mod_base = OTHER; note = 2'-O-Methyl-cytidine
  modified_base 70: mod_base = OTHER; note = 2'-O-Methyl-cytidine
  modified_base 71: mod_base = OTHER; note = 2'-O-Methyl-uridine
  modified_base 72: mod_base = OTHER; note = 2'-O-Methyl-uridine
  modified_base 73: mod_base = OTHER; note = 2'-O-Methyl-guanosine
  modified_base 74: mod_base = OTHER; note = 2'-O-Methyl-adenosine
  modified_base 75: mod_base = OTHER; note = 2'-O-Methyl-adenosine
  modified_base 76: mod_base = OTHER; note = 2'-O-Methyl-adenosine
  modified_base 77: mod_base = OTHER; note = 2'-O-Methyl-adenosine
  modified_base 78: mod_base = OTHER; note = 2'-O-Methyl-adenosine
  modified_base 79: mod_base = OTHER; note = 2'-O-Methyl-guanosine
  modified_base 80: mod_base = OTHER; note = 2'-O-Methyl-uridine
  modified_base 81: mod_base = OTHER; note = 2'-O-Methyl-guanosine
  modified_base 83: mod_base = OTHER; note = 2'-O-Methyl-cytidine
  modified_base 84: mod_base = OTHER; note = 2'-O-Methyl-adenosine
  modified_base 85: mod_base = OTHER; note = 2'-O-Methyl-cytidine
  modified_base 86: mod_base = OTHER; note = 2'-O-Methyl-cytidine
  modified_base 87: mod_base = OTHER; note = 2'-O-Methyl-guanosine
  modified_base 88: mod_base = OTHER; note = 2'-O-Methyl-adenosine
  modified_base 89: mod_base = OTHER; note = 2'-O-Methyl-guanosine
  modified_base 90: mod_base = OTHER; note = 2'-O-Methyl-uridine
  modified_base 91: mod_base = OTHER; note = 2'-O-Methyl-cytidine
  modified_base 92: mod_base = OTHER; note = 2'-O-Methyl-guanosine
  modified_base 93: mod_base = OTHER; note = 2'-O-Methyl-guanosine
  modified_base 94: mod_base = OTHER; note = 2'-O-Methyl-uridine
  modified_base 95: mod_base = OTHER; note = 2'-O-Methyl-guanosine
  modified_base 96: mod_base = OTHER; note = 2'-O-Methyl-cytidine
  modified_base 97: mod_base = OTHER; note = 2'-O-Methyl-uridine phosphorothioate
  modified_base 98: mod_base = OTHER; note = 2'-O-Methyl-uridine phosphorothioate
  modified_base 99: mod_base = OTHER; note = 2'-O-Methyl-uridine phosphorothioate
  modified_base 100: mod_base = OTHER; note = 2'-O-Methyl-uridine
  misc_difference 101: note = a, c, g, inosine, u, deoxyadenosine, deoxyguanosine, deoxycytidine, deoxyinosine, thymine, ribonebularine, 2'-O-methylnebularine, or 2'-deoxynebularine
  misc_difference 102: note = a, c, g, inosine, u, deoxyadenosine, deoxyguanosine, deoxycytidine, deoxyinosine, thymine, ribonebularine, 2'-O-methylnebularine, or 2'-deoxynebularine
  misc_difference 103: note = a, c, g, inosine, u, deoxyadenosine, deoxyguanosine, deoxycytidine, deoxyinosine, thymine, ribonebularine, 2'-O-methylnebularine, or 2'-deoxynebularine

SEQ ID NO: 2817 - RNA, 103 nt, synthetic construct; identical to SEQ ID NO: 1796
  source 1..103: mol_type = other RNA
  modified_base 1: mod_base = OTHER; note = 2'-O-Methyl-guanosine phosphorothioate
  modified_base 2: mod_base = OTHER; note = 2'-O-Methyl-adenosine phosphorothioate
  modified_base 3: mod_base = OTHER; note = 2'-O-Methyl-guanosine phosphorothioate
  modified_base 21: mod_base = OTHER; note = 2'-O-Methyl-guanosine
  modified_base 25: mod_base = OTHER; note = uridine phosphorothioate
  modified_base 28: mod_base = OTHER; note = 2'-O-Methyl-adenosine
  modified_base 29: mod_base = OTHER; note = 2'-O-Methyl-guanosine
  modified_base 30: mod_base = OTHER; note = 2'-O-Methyl-cytidine
  modified_base 31: mod_base = OTHER; note = 2'-O-Methyl-uridine
  modified_base 32: mod_base = OTHER; note = 2'-O-Methyl-adenosine
  modified_base 34: mod_base = OTHER; note = 2'-O-Methyl-adenosine
  modified_base 35: mod_base = OTHER; note = 2'-O-Methyl-adenosine
  modified_base 36: mod_base = OTHER; note = 2'-O-Methyl-adenosine
  modified_base 37: mod_base = OTHER; note = 2'-O-Methyl-uridine
  modified_base 38: mod_base = OTHER; note = 2'-O-Methyl-adenosine
  modified_base 39: mod_base = OTHER; note = 2'-O-Methyl-guanosine
  modified_base 40: mod_base = OTHER; note = 2'-O-Methyl-cytidine
  modified_base 41: mod_base = OTHER; note = 2'-O-Methyl-adenosine
  modified_base 42: mod_base = OTHER; note = 2'-O-Methyl-adenosine
  modified_base 45: mod_base = OTHER; note = uridine phosphorothioate
  modified_base 46: mod_base = OTHER; note = 2'-O-Methyl-adenosine
  modified_base 48: mod_base = OTHER; note = 2'-O-Methyl-adenosine
  modified_base 50: mod_base = OTHER; note = 2'-O-Methyl-uridine
  modified_base 52: mod_base = OTHER; note = 2'-O-Methyl-adenosine
  modified_base 53: mod_base = OTHER; note = 2'-O-Methyl-guanosine
  modified_base 54: mod_base = OTHER; note = 2'-O-Methyl-guanosine
  modified_base 55: mod_base = OTHER; note = 2'-O-Methyl-cytidine
  modified_base 56: mod_base = OTHER; note = 2'-O-Methyl-uridine
  modified_base 57: mod_base = OTHER; note = 2'-O-Methyl-adenosine
  modified_base 60: mod_base = OTHER; note = 2'-O-Methyl-cytidine
  modified_base 61: mod_base = OTHER; note = 2'-O-Methyl-cytidine
  modified_base 66: mod_base = OTHER; note = 2'-O-Methyl-uridine
  modified_base 67: mod_base = OTHER; note = 2'-O-Methyl-cytidine
  modified_base 70: mod_base = OTHER; note = 2'-O-Methyl-cytidine
  modified_base 71: mod_base = OTHER; note = 2'-O-Methyl-uridine
  modified_base 72: mod_base = OTHER; note = 2'-O-Methyl-uridine
  modified_base 74: mod_base = OTHER; note = 2'-O-Methyl-adenosine
  modified_base 75: mod_base = OTHER; note = 2'-O-Methyl-adenosine
  modified_base 76: mod_base = OTHER; note = 2'-O-Methyl-adenosine
  modified_base 77: mod_base = OTHER; note = 2'-O-Methyl-adenosine
  modified_base 78: mod_base = OTHER; note = 2'-O-Methyl-adenosine
  modified_base 79: mod_base = OTHER; note = 2'-O-Methyl-guanosine
  modified_base 80: mod_base = OTHER; note = 2'-O-Methyl-uridine
  modified_base 81: mod_base = OTHER; note = 2'-O-Methyl-guanosine
  modified_base 83: mod_base = OTHER; note = 2'-O-Methyl-cytidine
  modified_base 84: mod_base = OTHER; note = 2'-O-Methyl-adenosine
  modified_base 85: mod_base = OTHER; note = 2'-O-Methyl-cytidine
  modified_base 86: mod_base = OTHER; note = 2'-O-Methyl-cytidine
  modified_base 87: mod_base = OTHER; note = 2'-O-Methyl-guanosine
  modified_base 88: mod_base = OTHER; note = 2'-O-Methyl-adenosine
  modified_base 89: mod_base = OTHER; note = 2'-O-Methyl-guanosine
  modified_base 90: mod_base = OTHER; note = 2'-O-Methyl-uridine
  modified_base 91: mod_base = OTHER; note = 2'-O-Methyl-cytidine
  modified_base 92: mod_base = OTHER; note = 2'-O-Methyl-guanosine
  modified_base 93: mod_base = OTHER; note = 2'-O-Methyl-guanosine
  modified_base 94: mod_base = OTHER; note = 2'-O-Methyl-uridine
  modified_base 95: mod_base = OTHER; note = 2'-O-Methyl-guanosine
  modified_base 96: mod_base = OTHER; note = 2'-O-Methyl-cytidine
  modified_base 97: mod_base = OTHER; note = 2'-O-Methyl-uridine phosphorothioate
  modified_base 98: mod_base = OTHER; note = 2'-O-Methyl-uridine phosphorothioate
  modified_base 99: mod_base = OTHER; note = 2'-O-Methyl-uridine phosphorothioate
  modified_base 100: mod_base = OTHER; note = 2'-O-Methyl-uridine
  misc_difference 101: note = a, c, g, inosine, u, deoxyadenosine, deoxyguanosine, deoxycytidine, deoxyinosine, thymine, ribonebularine, 2'-O-methylnebularine, or 2'-deoxynebularine
  misc_difference 102: note = a, c, g, inosine, u, deoxyadenosine, deoxyguanosine, deoxycytidine, deoxyinosine, thymine, ribonebularine, 2'-O-methylnebularine, or 2'-deoxynebularine
  misc_difference 103: note = a, c, g, inosine, u, deoxyadenosine, deoxyguanosine, deoxycytidine, deoxyinosine, thymine, ribonebularine, 2'-O-methylnebularine, or 2'-deoxynebularine

SEQ ID NO: 2818 - RNA, 103 nt, synthetic construct; identical to SEQ ID NO: 1797
  source 1..103: mol_type = other RNA
  modified_base 1: mod_base = OTHER; note = 2'-O-Methyl-cytidine phosphorothioate
  modified_base 2: mod_base = OTHER; note = 2'-O-Methyl-adenosine phosphorothioate
  modified_base 3: mod_base = OTHER; note = 2'-O-Methyl-guanosine phosphorothioate
  modified_base 21: mod_base = OTHER; note = 2'-O-Methyl-guanosine
  modified_base 25: mod_base = OTHER; note = uridine phosphorothioate
  modified_base 28: mod_base = OTHER; note = 2'-O-Methyl-adenosine
  modified_base 29: mod_base = OTHER; note = 2'-O-Methyl-guanosine
  modified_base 30: mod_base = OTHER; note = 2'-O-Methyl-cytidine
  modified_base 31: mod_base = OTHER; note = 2'-O-Methyl-uridine
  modified_base 32: mod_base = OTHER; note = 2'-O-Methyl-adenosine
  modified_base 33: mod_base = OTHER; note = 2'-O-Methyl-guanosine
  modified_base 34: mod_base = OTHER; note = 2'-O-Methyl-adenosine
  modified_base 35: mod_base = OTHER; note = 2'-O-Methyl-adenosine
  modified_base 36: mod_base = OTHER; note = 2'-O-Methyl-adenosine
  modified_base 37: mod_base = OTHER; note = 2'-O-Methyl-uridine
  modified_base 38: mod_base = OTHER; note = 2'-O-Methyl-adenosine
  modified_base 39: mod_base = OTHER; note = 2'-O-Methyl-guanosine
  modified_base 40: mod_base = OTHER; note = 2'-O-Methyl-cytidine
  modified_base 41: mod_base = OTHER; note = 2'-O-Methyl-adenosine
  modified_base 42: mod_base = OTHER; note = 2'-O-Methyl-adenosine
  modified_base 45: mod_base = OTHER; note = uridine phosphorothioate
  modified_base 46: mod_base = OTHER; note = 2'-O-Methyl-adenosine
  modified_base 48: mod_base = OTHER; note = 2'-O-Methyl-adenosine
  modified_base 50: mod_base = OTHER; note = 2'-O-Methyl-uridine
  modified_base 52: mod_base = OTHER; note = 2'-O-Methyl-adenosine
  modified_base 53: mod_base = OTHER; note = 2'-O-Methyl-guanosine
  modified_base 54: mod_base = OTHER; note = 2'-O-Methyl-guanosine
  modified_base 57: mod_base = OTHER; note = 2'-O-Methyl-adenosine
  modified_base 61: mod_base = OTHER; note = 2'-O-Methyl-cytidine
  modified_base 66: mod_base = OTHER; note = 2'-O-Methyl-uridine
  modified_base 67: mod_base = OTHER; note = 2'-O-Methyl-cytidine
  modified_base 70: mod_base = OTHER; note = 2'-O-Methyl-cytidine
  modified_base 71: mod_base = OTHER; note = 2'-O-Methyl-uridine
  modified_base 72: mod_base = OTHER; note = 2'-O-Methyl-uridine
  modified_base 74: mod_base = OTHER; note = 2'-O-Methyl-adenosine
  modified_base 75: mod_base = OTHER; note = 2'-O-Methyl-adenosine
  modified_base 76: mod_base = OTHER; note = 2'-O-Methyl-adenosine
  modified_base 77: mod_base = OTHER; note = 2'-O-Methyl-adenosine
  modified_base 78: mod_base = OTHER; note = 2'-O-Methyl-adenosine
  modified_base 79: mod_base = OTHER; note = 2'-O-Methyl-guanosine
  modified_base 80: mod_base = OTHER; note = 2'-O-Methyl-uridine
  modified_base 82: mod_base = OTHER; note = 2'-O-Methyl-guanosine
  modified_base 83: mod_base = OTHER; note = 2'-O-Methyl-cytidine
  modified_base 84: mod_base = OTHER; note = 2'-O-Methyl-adenosine
  modified_base 85: mod_base = OTHER; note = 2'-O-Methyl-cytidine
  modified_base 86: mod_base = OTHER; note = 2'-O-Methyl-cytidine
  modified_base 87: mod_base = OTHER; note = 2'-O-Methyl-guanosine
  modified_base 89: mod_base = OTHER; note = 2'-O-Methyl-guanosine
  modified_base 92: mod_base = OTHER; note = 2'-O-Methyl-guanosine
  modified_base 93: mod_base = OTHER; note = 2'-O-Methyl-guanosine
  modified_base 94: mod_base = OTHER; note = 2'-O-Methyl-uridine
  modified_base 95: mod_base = OTHER; note = 2'-O-Methyl-guanosine
  modified_base 96: mod_base = OTHER; note = 2'-O-Methyl-cytidine
  modified_base 97: mod_base = OTHER; note = 2'-O-Methyl-uridine phosphorothioate
  modified_base 98: mod_base = OTHER; note = 2'-O-Methyl-uridine phosphorothioate
  modified_base 99: mod_base = OTHER; note = 2'-O-Methyl-uridine phosphorothioate
  modified_base 100: mod_base = OTHER; note = 2'-O-Methyl-uridine
  misc_difference 101: note = a, c, g, inosine, u, deoxyadenosine, deoxyguanosine, deoxycytidine, deoxyinosine, thymine, ribonebularine, 2'-O-methylnebularine, or 2'-deoxynebularine
  misc_difference 102: note = a, c, g, inosine, u, deoxyadenosine, deoxyguanosine, deoxycytidine, deoxyinosine, thymine, ribonebularine, 2'-O-methylnebularine, or 2'-deoxynebularine
  misc_difference 103: note = a, c, g, inosine, u, deoxyadenosine, deoxyguanosine, deoxycytidine, deoxyinosine, thymine, ribonebularine, 2'-O-methylnebularine, or 2'-deoxynebularine

SEQ ID NO: 2819 - RNA, 103 nt, synthetic construct; identical to SEQ ID NO: 1797
  source 1..103: mol_type = other RNA
  modified_base 1: mod_base = OTHER; note = 2'-O-Methyl-cytidine phosphorothioate
  modified_base 2: mod_base = OTHER; note = 2'-O-Methyl-adenosine phosphorothioate
  modified_base 3: mod_base = OTHER; note = 2'-O-Methyl-guanosine phosphorothioate
  modified_base 21: mod_base = OTHER; note = 2'-O-Methyl-guanosine
  modified_base 25: mod_base = OTHER; note = uridine phosphorothioate
  modified_base 28: mod_base = OTHER; note = 2'-O-Methyl-adenosine
  modified_base 29: mod_base = OTHER; note = 2'-O-Methyl-guanosine
  modified_base 30: mod_base = OTHER; note = 2'-O-Methyl-cytidine
  modified_base 31: mod_base = OTHER; note = 2'-O-Methyl-uridine
  modified_base 32: mod_base = OTHER; note = 2'-O-Methyl-adenosine
  modified_base 33: mod_base = OTHER; note = 2'-O-Methyl-guanosine
  modified_base 34: mod_base = OTHER; note = 2'-O-Methyl-adenosine
  modified_base 35: mod_base = OTHER; note = 2'-O-Methyl-adenosine
  modified_base 36: mod_base = OTHER; note = 2'-O-Methyl-adenosine
  modified_base 37: mod_base = OTHER; note = 2'-O-Methyl-uridine
  modified_base 38: mod_base = OTHER; note = 2'-O-Methyl-adenosine
  modified_base 39: mod_base = OTHER; note = 2'-O-Methyl-guanosine
  modified_base 40: mod_base = OTHER; note = 2'-O-Methyl-cytidine
  modified_base 41: mod_base = OTHER; note = 2'-O-Methyl-adenosine
  modified_base 42: mod_base = OTHER; note = 2'-O-Methyl-adenosine
  modified_base 45: mod_base = OTHER; note = uridine phosphorothioate
  modified_base 46: mod_base = OTHER; note = 2'-O-Methyl-adenosine
  modified_base 48: mod_base = OTHER; note = 2'-O-Methyl-adenosine
  modified_base 50: mod_base = OTHER; note = 2'-O-Methyl-uridine
  modified_base 52: mod_base = OTHER; note = 2'-O-Methyl-adenosine
  modified_base 53: mod_base = OTHER; note = 2'-O-Methyl-guanosine
  modified_base 54: mod_base = OTHER; note = 2'-O-Methyl-guanosine
  modified_base 55: mod_base = OTHER; note = 2'-O-Methyl-cytidine
  modified_base 56: mod_base = OTHER; note = 2'-O-Methyl-uridine
  modified_base 57: mod_base = OTHER; note = 2'-O-Methyl-adenosine
  modified_base 60: mod_base = OTHER; note = 2'-O-Methyl-cytidine
  modified_base 61: mod_base = OTHER; note = 2'-O-Methyl-cytidine
  modified_base 66: mod_base = OTHER; note = 2'-O-Methyl-uridine
  modified_base 67: mod_base = OTHER; note = 2'-O-Methyl-cytidine
  modified_base 70: mod_base = OTHER; note = 2'-O-Methyl-cytidine
  modified_base 71: mod_base = OTHER; note = 2'-O-Methyl-uridine
  modified_base 72: mod_base = OTHER; note = 2'-O-Methyl-uridine
  modified_base 74: mod_base = OTHER; note = 2'-O-Methyl-adenosine
  modified_base 75: mod_base = OTHER; note = 2'-O-Methyl-adenosine
  modified_base 76: mod_base = OTHER; note = 2'-O-Methyl-adenosine
  modified_base 77: mod_base = OTHER; note = 2'-O-Methyl-adenosine
  modified_base 78: mod_base = OTHER; note = 2'-O-Methyl-adenosine
  modified_base 79: mod_base = OTHER; note = 2'-O-Methyl-guanosine
  modified_base 80: mod_base = OTHER; note = 2'-O-Methyl-uridine
  modified_base 82: mod_base = OTHER; note = 2'-O-Methyl-guanosine
  modified_base 83: mod_base = OTHER; note = 2'-O-Methyl-cytidine
  modified_base 84: mod_base = OTHER; note = 2'-O-Methyl-adenosine
  modified_base 85: mod_base = OTHER; note = 2'-O-Methyl-cytidine
  modified_base 86: mod_base = OTHER; note = 2'-O-Methyl-cytidine
  modified_base 87: mod_base = OTHER; note = 2'-O-Methyl-guanosine
  modified_base 89: mod_base = OTHER; note = 2'-O-Methyl-guanosine
  modified_base 92: mod_base = OTHER; note = 2'-O-Methyl-guanosine
  modified_base 93: mod_base = OTHER; note = 2'-O-Methyl-guanosine
  modified_base 94: mod_base = OTHER; note = 2'-O-Methyl-uridine
  modified_base 95: mod_base = OTHER; note = 2'-O-Methyl-guanosine
  modified_base 96: mod_base = OTHER; note = 2'-O-Methyl-cytidine
  modified_base 97: mod_base = OTHER; note = 2'-O-Methyl-uridine phosphorothioate
  modified_base 98: mod_base = OTHER; note = 2'-O-Methyl-uridine phosphorothioate
  modified_base 99: mod_base = OTHER; note = 2'-O-Methyl-uridine phosphorothioate
  modified_base 100: mod_base = OTHER; note = 2'-O-Methyl-uridine
  misc_difference 101: note = a, c, g, inosine, u, deoxyadenosine, deoxyguanosine, deoxycytidine, deoxyinosine, thymine, ribonebularine, 2'-O-methylnebularine, or 2'-deoxynebularine
  misc_difference 102: note = a, c, g, inosine, u, deoxyadenosine, deoxyguanosine, deoxycytidine, deoxyinosine, thymine, ribonebularine, 2'-O-methylnebularine, or 2'-deoxynebularine
  misc_difference 103: note = a, c, g, inosine, u, deoxyadenosine, deoxyguanosine, deoxycytidine, deoxyinosine, thymine, ribonebularine, 2'-O-methylnebularine, or 2'-deoxynebularine

SEQ ID NO: 2820 - RNA, 103 nt, synthetic construct; identical to SEQ ID NO: 1797
  source 1..103: mol_type = other RNA
  modified_base 1: mod_base = OTHER; note = 2'-O-Methyl-cytidine phosphorothioate
  modified_base 2: mod_base = OTHER; note = 2'-O-Methyl-adenosine phosphorothioate
  modified_base 3: mod_base = OTHER; note = 2'-O-Methyl-guanosine phosphorothioate
  modified_base 21: mod_base = OTHER; note = 2'-O-Methyl-guanosine
  modified_base 25: mod_base = OTHER; note = uridine phosphorothioate
  modified_base 28: mod_base = OTHER; note = 2'-O-Methyl-adenosine
  modified_base 29: mod_base = OTHER; note = 2'-O-Methyl-guanosine
  modified_base 30: mod_base = OTHER; note = 2'-O-Methyl-cytidine
  modified_base 31: mod_base = OTHER; note = 2'-O-Methyl-uridine
  modified_base 32: mod_base = OTHER; note = 2'-O-Methyl-adenosine
  modified_base 33: mod_base = OTHER; note = 2'-O-Methyl-guanosine
  modified_base 34: mod_base = OTHER; note = 2'-O-Methyl-adenosine
  modified_base 35: mod_base = OTHER; note = 2'-O-Methyl-adenosine
  modified_base 36: mod_base = OTHER; note = 2'-O-Methyl-adenosine
  modified_base 37: mod_base = OTHER; note = 2'-O-Methyl-uridine
  modified_base 38: mod_base = OTHER; note = 2'-O-Methyl-adenosine
  modified_base 39: mod_base = OTHER; note = 2'-O-Methyl-guanosine
  modified_base 40: mod_base = OTHER; note = 2'-O-Methyl-cytidine
  modified_base 41: mod_base = OTHER; note = 2'-O-Methyl-adenosine
  modified_base 42: mod_base = OTHER; note = 2'-O-Methyl-adenosine
  modified_base 45: mod_base = OTHER; note = uridine phosphorothioate
  modified_base 46: mod_base = OTHER; note = 2'-O-Methyl-adenosine
  modified_base 48: mod_base = OTHER; note = 2'-O-Methyl-adenosine
  modified_base 50: mod_base = OTHER; note = 2'-O-Methyl-uridine
  modified_base 52: mod_base = OTHER; note = 2'-O-Methyl-adenosine
  modified_base 53: mod_base = OTHER; note = 2'-O-Methyl-guanosine
  modified_base 54: mod_base = OTHER; note = 2'-O-Methyl-guanosine
  modified_base 57: mod_base = OTHER; note = 2'-O-Methyl-adenosine
  modified_base 61: mod_base = OTHER; note = 2'-O-Methyl-cytidine
  modified_base 66: mod_base = OTHER; note = 2'-O-Methyl-uridine
  modified_base 67: mod_base = OTHER; note = 2'-O-Methyl-cytidine
  modified_base 70: mod_base = OTHER; note = 2'-O-Methyl-cytidine
  modified_base 71: mod_base = OTHER; note = 2'-O-Methyl-uridine
  modified_base 72: mod_base = OTHER; note = 2'-O-Methyl-uridine
  modified_base 73: mod_base = OTHER; note = 2'-O-Methyl-guanosine
  modified_base 74: mod_base = OTHER; note = 2'-O-Methyl-adenosine
  modified_base 75: mod_base = OTHER; note = 2'-O-Methyl-adenosine
  modified_base 76: mod_base = OTHER; note = 2'-O-Methyl-adenosine
  modified_base 77: mod_base = OTHER; note = 2'-O-Methyl-adenosine
  modified_base 78: mod_base = OTHER; note = 2'-O-Methyl-adenosine
  modified_base 79: mod_base = OTHER; note = 2'-O-Methyl-guanosine
  modified_base 80: mod_base = OTHER; note = 2'-O-Methyl-uridine
  modified_base 82: mod_base = OTHER; note = 2'-O-Methyl-guanosine
  modified_base 83: mod_base = OTHER; note = 2'-O-Methyl-cytidine
  modified_base 84: mod_base = OTHER; note = 2'-O-Methyl-adenosine
  modified_base 85: mod_base = OTHER; note = 2'-O-Methyl-cytidine
  modified_base 86: mod_base = OTHER; note = 2'-O-Methyl-cytidine
  modified_base 87: mod_base = OTHER; note = 2'-O-Methyl-guanosine
  modified_base 89: mod_base = OTHER; note = 2'-O-Methyl-guanosine
  modified_base 92: mod_base = OTHER; note = 2'-O-Methyl-guanosine
  modified_base 93: mod_base = OTHER; note = 2'-O-Methyl-guanosine
  modified_base 94: mod_base = OTHER; note = 2'-O-Methyl-uridine
  modified_base 95: mod_base = OTHER; note = 2'-O-Methyl-guanosine
  modified_base 96: mod_base = OTHER; note = 2'-O-Methyl-cytidine
  modified_base 97: mod_base = OTHER; note = 2'-O-Methyl-uridine phosphorothioate
  modified_base 98: mod_base = OTHER; note = 2'-O-Methyl-uridine phosphorothioate
  modified_base 99: mod_base = OTHER; note = 2'-O-Methyl-uridine phosphorothioate
  modified_base 100: mod_base = OTHER; note = 2'-O-Methyl-uridine
  misc_difference 101: note = a, c, g, inosine, u, deoxyadenosine, deoxyguanosine, deoxycytidine, deoxyinosine, thymine, ribonebularine, 2'-O-methylnebularine, or 2'-deoxynebularine
  misc_difference 102: note = a, c, g, inosine, u, deoxyadenosine, deoxyguanosine, deoxycytidine, deoxyinosine, thymine, ribonebularine, 2'-O-methylnebularine, or 2'-deoxynebularine
  misc_difference 103: note = a, c, g, inosine, u, deoxyadenosine, deoxyguanosine, deoxycytidine, deoxyinosine, thymine, ribonebularine, 2'-O-methylnebularine, or 2'-deoxynebularine

SEQ ID NO: 2821 - RNA, 103 nt, synthetic construct; identical to SEQ ID NO: 1797
  source 1..103: mol_type = other RNA
  modified_base 1: mod_base = OTHER; note = 2'-O-Methyl-cytidine phosphorothioate
  modified_base 2: mod_base = OTHER; note = 2'-O-Methyl-adenosine phosphorothioate
  modified_base 3: mod_base = OTHER; note = 2'-O-Methyl-guanosine phosphorothioate
  modified_base 21: mod_base = OTHER; note = 2'-O-Methyl-guanosine
  modified_base 25: mod_base = OTHER; note = uridine phosphorothioate
  modified_base 28: mod_base = OTHER; note = 2'-O-Methyl-adenosine
  modified_base 29: mod_base = OTHER; note = 2'-O-Methyl-guanosine
  modified_base 30: mod_base = OTHER; note = 2'-O-Methyl-cytidine
  modified_base 31: mod_base = OTHER; note = 2'-O-Methyl-uridine
  modified_base 32: mod_base = OTHER; note = 2'-O-Methyl-adenosine
  modified_base 33: mod_base = OTHER; note = 2'-O-Methyl-guanosine
  modified_base 34: mod_base = OTHER; note = 2'-O-Methyl-adenosine
  modified_base 35: mod_base = OTHER; note = 2'-O-Methyl-adenosine
  modified_base 36: mod_base = OTHER; note = 2'-O-Methyl-adenosine
  modified_base 37: mod_base = OTHER; note = 2'-O-Methyl-uridine
  modified_base 38: mod_base = OTHER; note = 2'-O-Methyl-adenosine
  modified_base 39: mod_base = OTHER; note = 2'-O-Methyl-guanosine
  modified_base 40: mod_base = OTHER; note = 2'-O-Methyl-cytidine
  modified_base 41: mod_base = OTHER; note = 2'-O-Methyl-adenosine
  modified_base 42: mod_base = OTHER; note = 2'-O-Methyl-adenosine
  modified_base 45: mod_base = OTHER; note = uridine phosphorothioate
  modified_base 46: mod_base = OTHER; note = 2'-O-Methyl-adenosine
  modified_base 48: mod_base = OTHER; note = 2'-O-Methyl-adenosine
  modified_base 50: mod_base = OTHER; note = 2'-O-Methyl-uridine
  modified_base 52: mod_base = OTHER; note = 2'-O-Methyl-adenosine
  modified_base 53: mod_base = OTHER; note = 2'-O-Methyl-guanosine
  modified_base 54: mod_base = OTHER; note = 2'-O-Methyl-guanosine
  modified_base 57: mod_base = OTHER; note = 2'-O-Methyl-adenosine
  modified_base 61: mod_base = OTHER; note = 2'-O-Methyl-cytidine
  modified_base 66: mod_base = OTHER; note = 2'-O-Methyl-uridine
  modified_base 67: mod_base = OTHER; note = 2'-O-Methyl-cytidine
  modified_base 70: mod_base = OTHER; note = 2'-O-Methyl-cytidine
  modified_base 71: mod_base = OTHER; note = 2'-O-Methyl-uridine
  modified_base 72: mod_base = OTHER; note = 2'-O-Methyl-uridine
  modified_base 73: mod_base = OTHER; note = 2'-O-Methyl-guanosine
  modified_base 74: mod_base = OTHER; note = 2'-O-Methyl-adenosine
  modified_base 75: mod_base = OTHER; note = 2'-O-Methyl-adenosine
  modified_base 76: mod_base = OTHER; note = 2'-O-Methyl-adenosine
  modified_base 77: mod_base = OTHER; note = 2'-O-Methyl-adenosine
  modified_base 78: mod_base = OTHER; note = 2'-O-Methyl-adenosine
  modified_base 79: mod_base = OTHER; note = 2'-O-Methyl-guanosine
  modified_base 80: mod_base = OTHER; note = 2'-O-Methyl-uridine
  modified_base 82: mod_base = OTHER; note = 2'-O-Methyl-guanosine
  modified_base 83: mod_base = OTHER; note = 2'-O-Methyl-cytidine
  modified_base 84: mod_base = OTHER; note = 2'-O-Methyl-adenosine
  modified_base 85: mod_base = OTHER; note = 2'-O-Methyl-cytidine
  modified_base 86: mod_base = OTHER; note = 2'-O-Methyl-cytidine
  modified_base 87: mod_base = OTHER; note = 2'-O-Methyl-guanosine
  modified_base 89: mod_base = OTHER; note = 2'-O-Methyl-guanosine
  modified_base 91: mod_base = OTHER; note = 2'-O-Methyl-cytidine
  modified_base 92: mod_base = OTHER; note = 2'-O-Methyl-guanosine
  modified_base 93: mod_base = OTHER; note = 2'-O-Methyl-guanosine
  modified_base 94: mod_base = OTHER; note = 2'-O-Methyl-uridine
  modified_base 95: mod_base = OTHER; note = 2'-O-Methyl-guanosine
  modified_base 96: mod_base = OTHER; note = 2'-O-Methyl-cytidine
  modified_base 97: mod_base = OTHER; note = 2'-O-Methyl-uridine phosphorothioate
  modified_base 98: mod_base = OTHER; note = 2'-O-Methyl-uridine phosphorothioate
  modified_base 99: mod_base = OTHER; note = 2'-O-Methyl-uridine phosphorothioate
  modified_base 100: mod_base = OTHER; note = 2'-O-Methyl-uridine
  misc_difference 101: note = a, c, g, inosine, u, deoxyadenosine, deoxyguanosine, deoxycytidine, deoxyinosine, thymine, ribonebularine, 2'-O-methylnebularine, or 2'-deoxynebularine
  misc_difference 102: note = a, c, g, inosine, u, deoxyadenosine, deoxyguanosine, deoxycytidine, deoxyinosine, thymine, ribonebularine, 2'-O-methylnebularine, or 2'-deoxynebularine
  misc_difference 103: note = a, c, g, inosine, u, deoxyadenosine, deoxyguanosine, deoxycytidine, deoxyinosine, thymine, ribonebularine, 2'-O-methylnebularine, or 2'-deoxynebularine

SEQ ID NO: 2822 - RNA, 103 nt, synthetic construct; identical to SEQ ID NO: 1797
  source 1..103: mol_type = other RNA
  modified_base 1: mod_base = OTHER; note = 2'-O-Methyl-cytidine phosphorothioate
  modified_base 2: mod_base = OTHER; note = 2'-O-Methyl-adenosine phosphorothioate
  modified_base 3: mod_base = OTHER; note = 2'-O-Methyl-guanosine phosphorothioate
  modified_base 21: mod_base = OTHER; note = 2'-O-Methyl-guanosine
  modified_base 25: mod_base = OTHER; note = uridine phosphorothioate
  modified_base 28: mod_base = OTHER; note = 2'-O-Methyl-adenosine
  modified_base 29: mod_base = OTHER; note = 2'-O-Methyl-guanosine
  modified_base 30: mod_base = OTHER; note = 2'-O-Methyl-cytidine
  modified_base 31: mod_base = OTHER; note = 2'-O-Methyl-uridine
  modified_base 32: mod_base = OTHER; note = 2'-O-Methyl-adenosine
  modified_base 34: mod_base = OTHER; note = 2'-O-Methyl-adenosine
  modified_base 35: mod_base = OTHER; note = 2'-O-Methyl-adenosine
  modified_base 36: mod_base = OTHER; note = 2'-O-Methyl-adenosine
  modified_base 37: mod_base = OTHER; note = 2'-O-Methyl-uridine
  modified_base 38: mod_base = OTHER; note = 2'-O-Methyl-adenosine
  modified_base 39: mod_base = OTHER; note = 2'-O-Methyl-guanosine
  modified_base 40: mod_base = OTHER; note = 2'-O-Methyl-cytidine
  modified_base 41: mod_base = OTHER; note = 2'-O-Methyl-adenosine
  modified_base 42: mod_base = OTHER; note = 2'-O-Methyl-adenosine
  modified_base 45: mod_base = OTHER; note = uridine phosphorothioate
  modified_base 46: mod_base = OTHER; note = 2'-O-Methyl-adenosine
  modified_base 48: mod_base = OTHER; note = 2'-O-Methyl-adenosine
  modified_base 50: mod_base = OTHER; note = 2'-O-Methyl-uridine
  modified_base 52: mod_base = OTHER; note = 2'-O-Methyl-adenosine
  modified_base 53: mod_base = OTHER; note = 2'-O-Methyl-guanosine
  modified_base 54: mod_base = OTHER; note = 2'-O-Methyl-guanosine
  modified_base 57: mod_base = OTHER; note = 2'-O-Methyl-adenosine
  modified_base 61: mod_base = OTHER; note = 2'-O-Methyl-cytidine
  modified_base 66: mod_base = OTHER; note = 2'-O-Methyl-uridine
  modified_base 67: mod_base = OTHER; note = 2'-O-Methyl-cytidine
  modified_base 70: mod_base = OTHER; note = 2'-O-Methyl-cytidine
  modified_base 71: mod_base = OTHER; note = 2'-O-Methyl-uridine
  modified_base 72: mod_base = OTHER; note = 2'-O-Methyl-uridine
  modified_base 73: mod_base = OTHER; note = 2'-O-Methyl-guanosine
  modified_base 74: mod_base = OTHER; note = 2'-O-Methyl-adenosine
  modified_base 75: mod_base = OTHER; note = 2'-O-Methyl-adenosine
  modified_base 76: mod_base = OTHER; note = 2'-O-Methyl-adenosine
  modified_base 77: mod_base = OTHER; note = 2'-O-Methyl-adenosine
  modified_base 78: mod_base = OTHER; note = 2'-O-Methyl-adenosine
  modified_base 79: mod_base = OTHER; note = 2'-O-Methyl-guanosine
  modified_base 80: mod_base = OTHER; note = 2'-O-Methyl-uridine
  modified_base 82: mod_base = OTHER; note = 2'-O-Methyl-guanosine
  modified_base 83: mod_base = OTHER; note = 2'-O-Methyl-cytidine
  modified_base 84: mod_base = OTHER; note = 2'-O-Methyl-adenosine
  modified_base 85: mod_base = OTHER; note = 2'-O-Methyl-cytidine
  modified_base 86: mod_base = OTHER; note = 2'-O-Methyl-cytidine
  modified_base 87: mod_base = OTHER; note = 2'-O-Methyl-guanosine
  modified_base 89: mod_base = OTHER; note = 2'-O-Methyl-guanosine
  modified_base 92: mod_base = OTHER; note = 2'-O-Methyl-guanosine
  modified_base 93: mod_base = OTHER; note = 2'-O-Methyl-guanosine
  modified_base 94: mod_base = OTHER; note = 2'-O-Methyl-uridine
  modified_base 95: mod_base = OTHER; note = 2'-O-Methyl-guanosine
  modified_base 96: mod_base = OTHER; note = 2'-O-Methyl-cytidine
  modified_base 97: mod_base = OTHER; note = 2'-O-Methyl-uridine phosphorothioate
  modified_base 98: mod_base = OTHER; note = 2'-O-Methyl-uridine phosphorothioate
  modified_base 99: mod_base = OTHER; note = 2'-O-Methyl-uridine phosphorothioate
  modified_base 100: mod_base = OTHER; note = 2'-O-Methyl-uridine
  misc_difference 101: note = a, c, g, inosine, u, deoxyadenosine, deoxyguanosine, deoxycytidine, deoxyinosine, thymine, ribonebularine, 2'-O-methylnebularine, or 2'-deoxynebularine
  misc_difference 102: note = a, c, g, inosine, u, deoxyadenosine, deoxyguanosine, deoxycytidine, deoxyinosine, thymine, ribonebularine, 2'-O-methylnebularine, or 2'-deoxynebularine
  misc_difference 103: note = a, c, g, inosine, u, deoxyadenosine, deoxyguanosine, deoxycytidine, deoxyinosine, thymine, ribonebularine, 2'-O-methylnebularine, or 2'-deoxynebularine

SEQ ID NO: 2823 - RNA, 103 nt, synthetic construct; identical to SEQ ID NO: 1797
  source 1..103: mol_type = other RNA
  modified_base 1: mod_base = OTHER; note = 2'-O-Methyl-cytidine phosphorothioate
  modified_base 2: mod_base = OTHER; note = 2'-O-Methyl-adenosine phosphorothioate
  modified_base 3: mod_base = OTHER; note = 2'-O-Methyl-guanosine phosphorothioate
  modified_base 21: mod_base = OTHER; note = 2'-O-Methyl-guanosine
  modified_base 25: mod_base = OTHER; note = uridine phosphorothioate
  modified_base 28: mod_base = OTHER; note = 2'-O-Methyl-adenosine
  modified_base 29: mod_base = OTHER; note = 2'-O-Methyl-guanosine
  modified_base 30: mod_base = OTHER; note = 2'-O-Methyl-cytidine
  modified_base 31: mod_base = OTHER; note = 2'-O-Methyl-uridine
  modified_base 32: mod_base = OTHER; note = 2'-O-Methyl-adenosine
  modified_base 34: mod_base = OTHER; note = 2'-O-Methyl-adenosine
  modified_base 35: mod_base = OTHER; note = 2'-O-Methyl-adenosine
  modified_base 36: mod_base = OTHER; note = 2'-O-Methyl-adenosine
  modified_base 37: mod_base = OTHER; note = 2'-O-Methyl-uridine
  modified_base 38: mod_base = OTHER; note = 2'-O-Methyl-adenosine
  modified_base 39: mod_base = OTHER; note = 2'-O-Methyl-guanosine
  modified_base 40: mod_base = OTHER; note = 2'-O-Methyl-cytidine
  modified_base 41: mod_base = OTHER; note = 2'-O-Methyl-adenosine
  modified_base 42: mod_base = OTHER; note = 2'-O-Methyl-adenosine
  modified_base 45: mod_base = OTHER; note = uridine phosphorothioate
  modified_base 46: mod_base = OTHER; note = 2'-O-Methyl-adenosine
  modified_base 48: mod_base = OTHER; note = 2'-O-Methyl-adenosine
  modified_base 50: mod_base = OTHER; note = 2'-O-Methyl-uridine
  modified_base 52: mod_base = OTHER; note = 2'-O-Methyl-adenosine
  modified_base 53: mod_base = OTHER; note = 2'-O-Methyl-guanosine
  modified_base 54: mod_base = OTHER; note = 2'-O-Methyl-guanosine
  modified_base 57: mod_base = OTHER; note = 2'-O-Methyl-adenosine
  modified_base 61: mod_base = OTHER; note = 2'-O-Methyl-cytidine
  modified_base 66: mod_base = OTHER; note = 2'-O-Methyl-uridine
  modified_base 67: mod_base = OTHER; note = 2'-O-Methyl-cytidine
  modified_base 70: mod_base = OTHER; note = 2'-O-Methyl-cytidine
  modified_base 71: mod_base = OTHER; note = 2'-O-Methyl-uridine
  modified_base 72: mod_base = OTHER; note = 2'-O-Methyl-uridine
  modified_base 73: mod_base = OTHER; note = 2'-O-Methyl-guanosine
  modified_base 74: mod_base = OTHER; note = 2'-O-Methyl-adenosine
  modified_base 75: mod_base = OTHER; note = 2'-O-Methyl-adenosine
  modified_base 76: mod_base = OTHER; note = 2'-O-Methyl-adenosine
  modified_base 77: mod_base = OTHER; note = 2'-O-Methyl-adenosine
  modified_base 78: mod_base = OTHER; note = 2'-O-Methyl-adenosine
  modified_base 79: mod_base = OTHER; note = 2'-O-Methyl-guanosine
  modified_base 80: mod_base = OTHER; note = 2'-O-Methyl-uridine
  modified_base 82: mod_base = OTHER; note = 2'-O-Methyl-guanosine
  modified_base 83: mod_base = OTHER; note = 2'-O-Methyl-cytidine
  modified_base 84: mod_base = OTHER; note = 2'-O-Methyl-adenosine
  modified_base 85: mod_base = OTHER; note = 2'-O-Methyl-cytidine
  modified_base 86: mod_base = OTHER; note = 2'-O-Methyl-cytidine
  modified_base 87: mod_base = OTHER; note = 2'-O-Methyl-guanosine
  modified_base 89: mod_base = OTHER; note = 2'-O-Methyl-guanosine
  modified_base 91: mod_base = OTHER; note = 2'-O-Methyl-cytidine
  modified_base 92: mod_base = OTHER; note = 2'-O-Methyl-guanosine
  modified_base 93: mod_base = OTHER; note = 2'-O-Methyl-guanosine
  modified_base 94: mod_base = OTHER; note = 2'-O-Methyl-uridine
  modified_base 95: mod_base = OTHER; note = 2'-O-Methyl-guanosine
  modified_base 96: mod_base = OTHER; note = 2'-O-Methyl-cytidine
  modified_base 97: mod_base = OTHER; note = 2'-O-Methyl-uridine phosphorothioate
  modified_base 98: mod_base = OTHER; note = 2'-O-Methyl-uridine phosphorothioate
  modified_base 99: mod_base = OTHER; note = 2'-O-Methyl-uridine phosphorothioate
  modified_base 100: mod_base = OTHER; note = 2'-O-Methyl-uridine
  misc_difference 101: note = a, c, g, inosine, u, deoxyadenosine, deoxyguanosine, deoxycytidine, deoxyinosine, thymine, ribonebularine, 2'-O-methylnebularine, or 2'-deoxynebularine
  misc_difference 102: note = a, c, g, inosine, u, deoxyadenosine, deoxyguanosine, deoxycytidine, deoxyinosine, thymine, ribonebularine, 2'-O-methylnebularine, or 2'-deoxynebularine
  misc_difference 103: note = a, c, g, inosine, u, deoxyadenosine, deoxyguanosine, deoxycytidine, deoxyinosine, thymine, ribonebularine, 2'-O-methylnebularine, or 2'-deoxynebularine

SEQ ID NO: 2824 - RNA, 103 nt, synthetic construct; identical to SEQ ID NO: 1797
  source 1..103: mol_type = other RNA
  modified_base 1: mod_base = OTHER; note = 2'-O-Methyl-cytidine phosphorothioate
  modified_base 2: mod_base = OTHER; note = 2'-O-Methyl-adenosine phosphorothioate
  modified_base 3: mod_base = OTHER; note = 2'-O-Methyl-guanosine phosphorothioate
  modified_base 21: mod_base = OTHER; note = 2'-O-Methyl-guanosine
  modified_base 25: mod_base = OTHER; note = uridine phosphorothioate
  modified_base 28: mod_base = OTHER; note = 2'-O-Methyl-adenosine
  modified_base 29: mod_base = OTHER; note = 2'-O-Methyl-guanosine
  modified_base 30: mod_base = OTHER; note = 2'-O-Methyl-cytidine
  modified_base 31: mod_base = OTHER; note = 2'-O-Methyl-uridine
  modified_base 32: mod_base = OTHER; note = 2'-O-Methyl-adenosine
  modified_base 34: mod_base = OTHER; note = 2'-O-Methyl-adenosine
  modified_base 35: mod_base = OTHER; note = 2'-O-Methyl-adenosine
  modified_base 36: mod_base = OTHER; note = 2'-O-Methyl-adenosine
  modified_base 37: mod_base = OTHER; note = 2'-O-Methyl-uridine
  modified_base 38: mod_base = OTHER; note = 2'-O-Methyl-adenosine
  modified_base 39: mod_base = OTHER; note = 2'-O-Methyl-guanosine
  modified_base 40: mod_base = OTHER; note = 2'-O-Methyl-cytidine
  modified_base 41: mod_base = OTHER; note = 2'-O-Methyl-adenosine
  modified_base 42: mod_base = OTHER; note = 2'-O-Methyl-adenosine
  modified_base 45: mod_base = OTHER; note = uridine phosphorothioate
  modified_base 46: mod_base = OTHER; note = 2'-O-Methyl-adenosine
  modified_base 48: mod_base = OTHER; note = 2'-O-Methyl-adenosine
  modified_base 50: mod_base = OTHER; note = 2'-O-Methyl-uridine
  modified_base 52: mod_base = OTHER; note = 2'-O-Methyl-adenosine
  modified_base 53: mod_base = OTHER; note = 2'-O-Methyl-guanosine
  modified_base 54: mod_base = OTHER; note = 2'-O-Methyl-guanosine
  modified_base 55: mod_base = OTHER; note = 2'-O-Methyl-cytidine
  modified_base 56: mod_base = OTHER; note = 2'-O-Methyl-uridine
  modified_base 57: mod_base = OTHER; note = 2'-O-Methyl-adenosine
  modified_base 60: mod_base = OTHER; note = 2'-O-Methyl-cytidine
  modified_base 61: mod_base = OTHER; note = 2'-O-Methyl-cytidine
  modified_base 66: mod_base = OTHER; note = 2'-O-Methyl-uridine
  modified_base 67: mod_base = OTHER; note = 2'-O-Methyl-cytidine
  modified_base 70: mod_base = OTHER; note = 2'-O-Methyl-cytidine
  modified_base 71: mod_base = OTHER; note = 2'-O-Methyl-uridine
  modified_base 72: mod_base = OTHER; note = 2'-O-Methyl-uridine
  modified_base 74: mod_base = OTHER; note = 2'-O-Methyl-adenosine
  modified_base 75: mod_base = OTHER; note = 2'-O-Methyl-adenosine
  modified_base 76: mod_base = OTHER; note = 2'-O-Methyl-adenosine
  modified_base 77: mod_base = OTHER; note = 2'-O-Methyl-adenosine
  modified_base 78: mod_base = OTHER; note = 2'-O-Methyl-adenosine
  modified_base 79: mod_base = OTHER; note = 2'-O-Methyl-guanosine
  modified_base 80: mod_base = OTHER; note = 2'-O-Methyl-uridine
  modified_base 82: mod_base = OTHER; note = 2'-O-Methyl-guanosine
  modified_base 83: mod_base = OTHER; note = 2'-O-Methyl-cytidine
  modified_base 84: mod_base = OTHER; note = 2'-O-Methyl-adenosine
  modified_base 85: mod_base = OTHER; note = 2'-O-Methyl-cytidine
  modified_base 86: mod_base = OTHER; note = 2'-O-Methyl-cytidine
  modified_base 87: mod_base = OTHER; note = 2'-O-Methyl-guanosine
  modified_base 89: mod_base = OTHER; note = 2'-O-Methyl-guanosine
  modified_base 92: mod_base = OTHER; note = 2'-O-Methyl-guanosine
  modified_base 93: mod_base = OTHER; note = 2'-O-Methyl-guanosine
  modified_base 94: mod_base = OTHER; note = 2'-O-Methyl-uridine
  modified_base 95: mod_base = OTHER; note = 2'-O-Methyl-guanosine
  modified_base 96: mod_base = OTHER; note = 2'-O-Methyl-cytidine
  modified_base 97: mod_base = OTHER; note = 2'-O-Methyl-uridine phosphorothioate
  modified_base 98: mod_base = OTHER; note = 2'-O-Methyl-uridine phosphorothioate
  modified_base 99: mod_base = OTHER; note = 2'-O-Methyl-uridine phosphorothioate
  modified_base 100: mod_base = OTHER; note = 2'-O-Methyl-uridine
  misc_difference 101: note = a, c, g, inosine, u, deoxyadenosine, deoxyguanosine, deoxycytidine, deoxyinosine, thymine, ribonebularine, 2'-O-methylnebularine, or 2'-deoxynebularine
  misc_difference 102: note = a, c, g, inosine, u, deoxyadenosine, deoxyguanosine, deoxycytidine, deoxyinosine, thymine, ribonebularine, 2'-O-methylnebularine, or 2'-deoxynebularine
  misc_difference 103: note = a, c, g, inosine, u, deoxyadenosine, deoxyguanosine, deoxycytidine, deoxyinosine, thymine, ribonebularine, 2'-O-methylnebularine, or 2'-deoxynebularine

SEQ ID NO: 2825 - RNA, 103 nt, synthetic construct; identical to SEQ ID NO: 1795
  source 1..103: mol_type = other RNA
  modified_base 1: mod_base = OTHER; note = 2'-O-Methyl-cytidine phosphorothioate
  modified_base 2: mod_base = OTHER; note = 2'-O-Methyl-cytidine phosphorothioate
  modified_base 3: mod_base = OTHER; note = 2'-O-Methyl-cytidine phosphorothioate
  modified_base 21: mod_base = OTHER; note = 2'-O-Methyl-guanosine
  modified_base 25: mod_base = OTHER; note = uridine phosphorothioate
  modified_base 28: mod_base = OTHER; note = 2'-O-Methyl-adenosine
  modified_base 29: mod_base = OTHER; note = 2'-O-Methyl-guanosine
  modified_base 30: mod_base = OTHER; note = 2'-O-Methyl-cytidine
  modified_base 31: mod_base = OTHER; note = 2'-O-Methyl-uridine
  modified_base 32: mod_base = OTHER; note = 2'-O-Methyl-adenosine
  modified_base 33: mod_base = OTHER; note = 2'-O-Methyl-guanosine
  modified_base 34: mod_base = OTHER; note = 2'-O-Methyl-adenosine
  modified_base 35: mod_base = OTHER; note = 2'-O-Methyl-adenosine
  modified_base 36: mod_base = OTHER; note = 2'-O-Methyl-adenosine
  modified_base 37: mod_base = OTHER; note = 2'-O-Methyl-uridine
  modified_base 38: mod_base = OTHER; note = 2'-O-Methyl-adenosine
  modified_base 39: mod_base = OTHER; note = 2'-O-Methyl-guanosine
  modified_base 40: mod_base = OTHER; note = 2'-O-Methyl-cytidine
  modified_base 41: mod_base = OTHER; note = 2'-O-Methyl-adenosine
  modified_base 42: mod_base = OTHER; note = 2'-O-Methyl-adenosine
  modified_base 46: mod_base = OTHER; note = 2'-O-Methyl-adenosine
  modified_base 48: mod_base = OTHER; note = 2'-O-Methyl-adenosine
  modified_base 50: mod_base = OTHER; note = 2'-O-Methyl-uridine
  modified_base 52: mod_base = OTHER; note = 2'-O-Methyl-adenosine
  modified_base 53: mod_base = OTHER; note = 2'-O-Methyl-guanosine
  modified_base 54: mod_base = OTHER; note = 2'-O-Methyl-guanosine
  modified_base 55: mod_base = OTHER; note = 2'-O-Methyl-cytidine
  modified_base 56: mod_base = OTHER; note = 2'-O-Methyl-uridine
  modified_base 57: mod_base = OTHER; note = 2'-O-Methyl-adenosine
  modified_base 60: mod_base = OTHER; note = 2'-O-Methyl-cytidine
  modified_base 61: mod_base = OTHER; note = 2'-O-Methyl-cytidine
  modified_base 64: mod_base = OTHER; note = uridine phosphorothioate
  modified_base 66: mod_base = OTHER; note = 2'-O-Methyl-uridine
  modified_base 67: mod_base = OTHER; note = 2'-O-Methyl-cytidine
  modified_base 70: mod_base = OTHER; note = 2'-O-Methyl-cytidine
  modified_base 71: mod_base = OTHER; note = 2'-O-Methyl-uridine
  modified_base 72: mod_base = OTHER; note = 2'-O-Methyl-uridine
  modified_base 73: mod_base = OTHER; note = 2'-O-Methyl-guanosine
  modified_base 74: mod_base = OTHER; note = 2'-O-Methyl-adenosine
  modified_base 75: mod_base = OTHER; note = 2'-O-Methyl-adenosine
  modified_base 76: mod_base = OTHER; note = 2'-O-Methyl-adenosine
  modified_base 77: mod_base = OTHER; note = 2'-O-Methyl-adenosine
  modified_base 78: mod_base = OTHER; note = 2'-O-Methyl-adenosine
  modified_base 79: mod_base = OTHER; note = 2'-O-Methyl-guanosine
  modified_base 80: mod_base = OTHER; note = 2'-O-Methyl-uridine
  modified_base 81: mod_base = OTHER; note = 2'-O-Methyl-guanosine
  modified_base 83: mod_base = OTHER; note = 2'-O-Methyl-cytidine
  modified_base 84: mod_base = OTHER; note = 2'-O-Methyl-adenosine
  modified_base 85: mod_base = OTHER; note = 2'-O-Methyl-cytidine
  modified_base 86: mod_base = OTHER; note = 2'-O-Methyl-cytidine
  modified_base 87: mod_base = OTHER; note = 2'-O-Methyl-guanosine
  modified_base 88: mod_base = OTHER; note = 2'-O-Methyl-adenosine
  modified_base 89: mod_base = OTHER; note = 2'-O-Methyl-guanosine
  modified_base 90: mod_base = OTHER; note = 2'-O-Methyl-uridine
  modified_base 91: mod_base = OTHER; note = 2'-O-Methyl-cytidine
  modified_base 92: mod_base = OTHER; note = 2'-O-Methyl-guanosine
  modified_base 93: mod_base = OTHER; note = 2'-O-Methyl-guanosine
  modified_base 94: mod_base = OTHER; note = 2'-O-Methyl-uridine
  modified_base 95: mod_base = OTHER; note = 2'-O-Methyl-guanosine
  modified_base 96: mod_base = OTHER; note = 2'-O-Methyl-cytidine
  modified_base 97: mod_base = OTHER; note = 2'-O-Methyl-uridine phosphorothioate
  modified_base 98: mod_base = OTHER; note = 2'-O-Methyl-uridine phosphorothioate
  modified_base 99: mod_base = OTHER; note = 2'-O-Methyl-uridine phosphorothioate
  modified_base 100: mod_base = OTHER; note = 2'-O-Methyl-uridine
  misc_difference 101: note = a, c, g, inosine, u, deoxyadenosine, deoxyguanosine, deoxycytidine, deoxyinosine, thymine, ribonebularine, 2'-O-methylnebularine, or 2'-deoxynebularine
  misc_difference 102: note = a, c, g, inosine, u, deoxyadenosine, deoxyguanosine, deoxycytidine, deoxyinosine, thymine, ribonebularine, 2'-O-methylnebularine, or 2'-deoxynebularine
  misc_difference 103: note = a, c, g, inosine, u, deoxyadenosine, deoxyguanosine, deoxycytidine, deoxyinosine, thymine, ribonebularine, 2'-O-methylnebularine, or 2'-deoxynebularine

SEQ ID NO: 2826 - RNA, 103 nt, synthetic construct; identical to SEQ ID NO: 1795
  source 1..103: mol_type = other RNA
  modified_base 1: mod_base = OTHER; note = 2'-O-Methyl-cytidine phosphorothioate
  modified_base 2: mod_base = OTHER; note = 2'-O-Methyl-cytidine phosphorothioate
  modified_base 3: mod_base = OTHER; note = 2'-O-Methyl-cytidine phosphorothioate
  modified_base 21: mod_base = OTHER; note = 2'-O-Methyl-guanosine
  modified_base 25: mod_base = OTHER; note = uridine phosphorothioate
  modified_base 28: mod_base = OTHER; note = 2'-O-Methyl-adenosine
  modified_base 29: mod_base = OTHER; note = 2'-O-Methyl-guanosine
  modified_base 30: mod_base = OTHER; note = 2'-O-Methyl-cytidine
  modified_base 31: mod_base = OTHER; note = 2'-O-Methyl-uridine
  modified_base 32: mod_base = OTHER; note = 2'-O-Methyl-adenosine
  modified_base 34: mod_base = OTHER; note = 2'-O-Methyl-adenosine
  modified_base 35: mod_base = OTHER; note = 2'-O-Methyl-adenosine
  modified_base 36: mod_base = OTHER; note = 2'-O-Methyl-adenosine
  modified_base 37: mod_base = OTHER; note = 2'-O-Methyl-uridine
  modified_base 38: mod_base = OTHER; note = 2'-O-Methyl-adenosine
  modified_base 39: mod_base = OTHER; note = 2'-O-Methyl-guanosine
  modified_base 40: mod_base = OTHER; note = 2'-O-Methyl-cytidine
  modified_base 41: mod_base = OTHER; note = 2'-O-Methyl-adenosine
  modified_base 42: mod_base = OTHER; note = 2'-O-Methyl-adenosine
  modified_base 46: mod_base = OTHER; note = 2'-O-Methyl-adenosine
  modified_base 48: mod_base = OTHER; note = 2'-O-Methyl-adenosine
  modified_base 50: mod_base = OTHER; note = 2'-O-Methyl-uridine
  modified_base 52: mod_base = OTHER; note = 2'-O-Methyl-adenosine
  modified_base 53: mod_base = OTHER; note = 2'-O-Methyl-guanosine
  modified_base 54: mod_base = OTHER; note = 2'-O-Methyl-guanosine
  modified_base 55: mod_base = OTHER; note = 2'-O-Methyl-cytidine
  modified_base 56: mod_base = OTHER; note = 2'-O-Methyl-uridine
  modified_base 57: mod_base = OTHER; note = 2'-O-Methyl-adenosine
  modified_base 60: mod_base = OTHER; note = 2'-O-Methyl-cytidine
  modified_base 61: mod_base = OTHER; note = 2'-O-Methyl-cytidine
  modified_base 64: mod_base = OTHER; note = uridine phosphorothioate
  modified_base 66: mod_base = OTHER; note = 2'-O-Methyl-uridine
  modified_base 67: mod_base = OTHER; note = 2'-O-Methyl-cytidine
  modified_base 70: mod_base = OTHER; note = 2'-O-Methyl-cytidine
  modified_base 71: mod_base = OTHER; note = 2'-O-Methyl-uridine
  modified_base 72: mod_base = OTHER; note = 2'-O-Methyl-uridine
  modified_base 74: mod_base = OTHER; note = 2'-O-Methyl-adenosine
  modified_base 75: mod_base = OTHER; note = 2'-O-Methyl-adenosine
  modified_base 76: mod_base = OTHER; note = 2'-O-Methyl-adenosine
  modified_base 77: mod_base = OTHER; note = 2'-O-Methyl-adenosine
  modified_base 78: mod_base = OTHER; note = 2'-O-Methyl-adenosine
  modified_base 79: mod_base = OTHER; note = 2'-O-Methyl-guanosine
  modified_base 80: mod_base = OTHER; note = 2'-O-Methyl-uridine
  modified_base 81: mod_base = OTHER; note = 2'-O-Methyl-guanosine
  modified_base 83: mod_base = OTHER; note = 2'-O-Methyl-cytidine
  modified_base 84: mod_base = OTHER; note = 2'-O-Methyl-adenosine
  modified_base 85: mod_base = OTHER; note = 2'-O-Methyl-cytidine
  modified_base 86: mod_base = OTHER; note = 2'-O-Methyl-cytidine
  modified_base 87: mod_base = OTHER; note = 2'-O-Methyl-guanosine
  modified_base 88: mod_base = OTHER; note = 2'-O-Methyl-adenosine
  modified_base 89: mod_base = OTHER; note = 2'-O-Methyl-guanosine
  modified_base 90: mod_base = OTHER; note = 2'-O-Methyl-uridine
  modified_base 91: mod_base = OTHER; note = 2'-O-Methyl-cytidine
  modified_base 92: mod_base = OTHER; note = 2'-O-Methyl-guanosine
  modified_base 93: mod_base = OTHER; note = 2'-O-Methyl-guanosine
  modified_base 94: mod_base = OTHER; note = 2'-O-Methyl-uridine
  modified_base 95: mod_base = OTHER; note = 2'-O-Methyl-guanosine
  modified_base 96: mod_base = OTHER; note = 2'-O-Methyl-cytidine
  modified_base 97: mod_base = OTHER; note = 2'-O-Methyl-uridine phosphorothioate
  modified_base 98: mod_base = OTHER; note = 2'-O-Methyl-uridine phosphorothioate
  modified_base 99: mod_base = OTHER; note = 2'-O-Methyl-uridine phosphorothioate
  modified_base 100: mod_base = OTHER; note = 2'-O-Methyl-uridine
  misc_difference 101: note = a, c, g, inosine, u, deoxyadenosine, deoxyguanosine, deoxycytidine, deoxyinosine, thymine, ribonebularine, 2'-O-methylnebularine, or 2'-deoxynebularine
  misc_difference 102: note = a, c, g, inosine, u, deoxyadenosine, deoxyguanosine, deoxycytidine, deoxyinosine, thymine, ribonebularine, 2'-O-methylnebularine, or 2'-deoxynebularine
  misc_difference 103: note = a, c, g, inosine, u, deoxyadenosine, deoxyguanosine, deoxycytidine, deoxyinosine, thymine, ribonebularine, 2'-O-methylnebularine, or 2'-deoxynebularine

SEQ ID NO: 2827 - RNA, 103 nt, synthetic construct; identical to SEQ ID NO: 1796
  source 1..103: mol_type = other RNA
  modified_base 1: mod_base = OTHER; note = 2'-O-Methyl-guanosine phosphorothioate
  modified_base 2: mod_base = OTHER; note = 2'-O-Methyl-adenosine phosphorothioate
  modified_base 3: mod_base = OTHER; note = 2'-O-Methyl-guanosine phosphorothioate
  modified_base 21: mod_base = OTHER; note = 2'-O-Methyl-guanosine
  modified_base 25: mod_base = OTHER; note = uridine phosphorothioate
  modified_base 28: mod_base = OTHER; note = 2'-O-Methyl-adenosine
  modified_base 29: mod_base = OTHER; note = 2'-O-Methyl-guanosine
  modified_base 30: mod_base = OTHER; note = 2'-O-Methyl-cytidine
  modified_base 31: mod_base = OTHER; note = 2'-O-Methyl-uridine
  modified_base 32: mod_base = OTHER; note = 2'-O-Methyl-adenosine
  modified_base 33: mod_base = OTHER; note = 2'-O-Methyl-guanosine
  modified_base 34: mod_base = OTHER; note = 2'-O-Methyl-adenosine
  modified_base 35: mod_base = OTHER; note = 2'-O-Methyl-adenosine
  modified_base 36: mod_base = OTHER; note = 2'-O-Methyl-adenosine
  modified_base 37: mod_base = OTHER; note = 2'-O-Methyl-uridine
  modified_base 38: mod_base = OTHER; note = 2'-O-Methyl-adenosine
  modified_base 39: mod_base = OTHER; note = 2'-O-Methyl-guanosine
  modified_base 40: mod_base = OTHER; note = 2'-O-Methyl-cytidine
  modified_base 41: mod_base = OTHER; note = 2'-O-Methyl-adenosine
  modified_base 42: mod_base = OTHER; note = 2'-O-Methyl-adenosine
  modified_base 46: mod_base = OTHER; note = 2'-O-Methyl-adenosine
  modified_base 48: mod_base = OTHER; note = 2'-O-Methyl-adenosine
  modified_base 50: mod_base = OTHER; note = 2'-O-Methyl-uridine
  modified_base 52: mod_base = OTHER; note = 2'-O-Methyl-adenosine
  modified_base 53: mod_base = OTHER; note = 2'-O-Methyl-guanosine
  modified_base 54: mod_base = OTHER; note = 2'-O-Methyl-guanosine
  modified_base 55: mod_base = OTHER; note = 2'-O-Methyl-cytidine
  modified_base 56: mod_base = OTHER; note = 2'-O-Methyl-uridine
  modified_base 57: mod_base = OTHER; note = 2'-O-Methyl-adenosine
  modified_base 60: mod_base = OTHER; note = 2'-O-Methyl-cytidine
  modified_base 61: mod_base = OTHER; note = 2'-O-Methyl-cytidine
  modified_base 64: mod_base = OTHER; note = uridine phosphorothioate
  modified_base 66: mod_base = OTHER; note = 2'-O-Methyl-uridine
  modified_base 67: mod_base = OTHER; note = 2'-O-Methyl-cytidine
  modified_base 70: mod_base = OTHER; note = 2'-O-Methyl-cytidine
  modified_base 71: mod_base = OTHER; note = 2'-O-Methyl-uridine
  modified_base 72: mod_base = OTHER; note = 2'-O-Methyl-uridine
  modified_base 73: mod_base = OTHER; note = 2'-O-Methyl-guanosine
  modified_base 74: mod_base = OTHER; note = 2'-O-Methyl-adenosine
  modified_base 75: mod_base = OTHER; note = 2'-O-Methyl-adenosine
  modified_base 76: mod_base = OTHER; note = 2'-O-Methyl-adenosine
  modified_base 77: mod_base = OTHER; note = 2'-O-Methyl-adenosine
  modified_base 78: mod_base = OTHER; note = 2'-O-Methyl-adenosine
  modified_base 79: mod_base = OTHER; note = 2'-O-Methyl-guanosine
  modified_base 80: mod_base = OTHER; note = 2'-O-Methyl-uridine
  modified_base 81: mod_base = OTHER; note = 2'-O-Methyl-guanosine
  modified_base 83: mod_base = OTHER; note = 2'-O-Methyl-cytidine
  modified_base 84: mod_base = OTHER; note = 2'-O-Methyl-adenosine
  modified_base 85: mod_base = OTHER; note = 2'-O-Methyl-cytidine
  modified_base 86: mod_base = OTHER; note = 2'-O-Methyl-cytidine
  modified_base 87: mod_base = OTHER; note = 2'-O-Methyl-guanosine
  modified_base 88: mod_base = OTHER; note = 2'-O-Methyl-adenosine
  modified_base 89: mod_base = OTHER; note = 2'-O-Methyl-guanosine
  modified_base 90: mod_base = OTHER; note = 2'-O-Methyl-uridine
  modified_base 91: mod_base = OTHER; note = 2'-O-Methyl-cytidine
  modified_base 92: mod_base = OTHER; note = 2'-O-Methyl-guanosine
  modified_base 93: mod_base = OTHER; note = 2'-O-Methyl-guanosine
  modified_base 94: mod_base = OTHER; note = 2'-O-Methyl-uridine
  modified_base 95: mod_base = OTHER; note = 2'-O-Methyl-guanosine
  modified_base 96: mod_base = OTHER; note = 2'-O-Methyl-cytidine
  modified_base 97: mod_base = OTHER; note = 2'-O-Methyl-uridine phosphorothioate
  modified_base 98: mod_base = OTHER; note = 2'-O-Methyl-uridine phosphorothioate
  modified_base 99: mod_base = OTHER; note = 2'-O-Methyl-uridine phosphorothioate
  modified_base 100: mod_base = OTHER; note = 2'-O-Methyl-uridine
  misc_difference 101: note = a, c, g, inosine, u, deoxyadenosine, deoxyguanosine, deoxycytidine, deoxyinosine, thymine, ribonebularine, 2'-O-methylnebularine, or 2'-deoxynebularine
  misc_difference 102: note = a, c, g, inosine, u, deoxyadenosine, deoxyguanosine, deoxycytidine, deoxyinosine, thymine, ribonebularine, 2'-O-methylnebularine, or 2'-deoxynebularine
  misc_difference 103: note = a, c, g, inosine, u, deoxyadenosine, deoxyguanosine, deoxycytidine, deoxyinosine, thymine, ribonebularine, 2'-O-methylnebularine, or 2'-deoxynebularine

SEQ ID NO: 2828 - RNA, 103 nt, synthetic construct; identical to SEQ ID NO: 1796
  source 1..103: mol_type = other RNA
  modified_base 1: mod_base = OTHER; note = 2'-O-Methyl-guanosine phosphorothioate
  modified_base 2: mod_base = OTHER; note = 2'-O-Methyl-adenosine phosphorothioate
  modified_base 3: mod_base = OTHER; note = 2'-O-Methyl-guanosine phosphorothioate
  modified_base 21: mod_base = OTHER; note = 2'-O-Methyl-guanosine
  modified_base 25: mod_base = OTHER; note = uridine phosphorothioate
  modified_base 28: mod_base = OTHER; note = 2'-O-Methyl-adenosine
  modified_base 29: mod_base = OTHER; note = 2'-O-Methyl-guanosine
  modified_base 30: mod_base = OTHER; note = 2'-O-Methyl-cytidine
  modified_base 31: mod_base = OTHER; note = 2'-O-Methyl-uridine
  modified_base 32: mod_base = OTHER; note = 2'-O-Methyl-adenosine
  modified_base 34: mod_base = OTHER; note = 2'-O-Methyl-adenosine
  modified_base 35: mod_base = OTHER; note = 2'-O-Methyl-adenosine
  modified_base 36: mod_base = OTHER; note = 2'-O-Methyl-adenosine
  modified_base 37: mod_base = OTHER; note = 2'-O-Methyl-uridine
  modified_base 38: mod_base = OTHER; note = 2'-O-Methyl-adenosine
  modified_base 39: mod_base = OTHER; note = 2'-O-Methyl-guanosine
  modified_base 40: mod_base = OTHER; note = 2'-O-Methyl-cytidine
  modified_base 41: mod_base = OTHER; note = 2'-O-Methyl-adenosine
  modified_base 42: mod_base = OTHER; note = 2'-O-Methyl-adenosine
  modified_base 46: mod_base = OTHER; note = 2'-O-Methyl-adenosine
  modified_base 48: mod_base = OTHER; note = 2'-O-Methyl-adenosine
  modified_base 50: mod_base = OTHER; note = 2'-O-Methyl-uridine
  modified_base 52: mod_base = OTHER; note = 2'-O-Methyl-adenosine
  modified_base 53: mod_base = OTHER; note = 2'-O-Methyl-guanosine
  modified_base 54: mod_base = OTHER; note = 2'-O-Methyl-guanosine
  modified_base 55: mod_base = OTHER; note = 2'-O-Methyl-cytidine
  modified_base 56: mod_base = OTHER; note = 2'-O-Methyl-uridine
  modified_base 57: mod_base = OTHER; note = 2'-O-Methyl-adenosine
  modified_base 60: mod_base = OTHER; note = 2'-O-Methyl-cytidine
  modified_base 61: mod_base = OTHER; note = 2'-O-Methyl-cytidine
  modified_base 64: mod_base = OTHER; note = uridine phosphorothioate
  modified_base 66: mod_base = OTHER; note = 2'-O-Methyl-uridine
  modified_base 67: mod_base = OTHER; note = 2'-O-Methyl-cytidine
  modified_base 70: mod_base = OTHER; note = 2'-O-Methyl-cytidine
  modified_base 71: mod_base = OTHER; note = 2'-O-Methyl-uridine
  modified_base 72: mod_base = OTHER; note = 2'-O-Methyl-uridine
  modified_base 74: mod_base = OTHER; note = 2'-O-Methyl-adenosine
  modified_base 75: mod_base = OTHER; note = 2'-O-Methyl-adenosine
  modified_base 76: mod_base = OTHER; note = 2'-O-Methyl-adenosine
  modified_base 77: mod_base = OTHER; note = 2'-O-Methyl-adenosine
  modified_base 78: mod_base = OTHER; note = 2'-O-Methyl-adenosine
  modified_base 79: mod_base = OTHER; note = 2'-O-Methyl-guanosine
  modified_base 80: mod_base = OTHER; note = 2'-O-Methyl-uridine
  modified_base 81: mod_base = OTHER; note = 2'-O-Methyl-guanosine
  modified_base 83: mod_base = OTHER; note = 2'-O-Methyl-cytidine
  modified_base 84: mod_base = OTHER; note = 2'-O-Methyl-adenosine
  modified_base 85: mod_base = OTHER; note = 2'-O-Methyl-cytidine
  modified_base 86: mod_base = OTHER; note = 2'-O-Methyl-cytidine
  modified_base 87: mod_base = OTHER; note = 2'-O-Methyl-guanosine
  modified_base 88: mod_base = OTHER; note = 2'-O-Methyl-adenosine
  modified_base 89: mod_base = OTHER; note = 2'-O-Methyl-guanosine
  modified_base 90: mod_base = OTHER; note = 2'-O-Methyl-uridine
  modified_base 91: mod_base = OTHER; note = 2'-O-Methyl-cytidine
  modified_base 92: mod_base = OTHER; note = 2'-O-Methyl-guanosine
  modified_base 93: mod_base = OTHER; note = 2'-O-Methyl-guanosine
  modified_base 94: mod_base = OTHER; note = 2'-O-Methyl-uridine
  modified_base 95: mod_base = OTHER; note = 2'-O-Methyl-guanosine
  modified_base 96: mod_base = OTHER; note = 2'-O-Methyl-cytidine
  modified_base 97: mod_base = OTHER; note = 2'-O-Methyl-uridine phosphorothioate
  modified_base 98: mod_base = OTHER; note = 2'-O-Methyl-uridine phosphorothioate
  modified_base 99: mod_base = OTHER; note = 2'-O-Methyl-uridine phosphorothioate
  modified_base 100: mod_base = OTHER; note = 2'-O-Methyl-uridine
  misc_difference 101: note = a, c, g, inosine, u, deoxyadenosine, deoxyguanosine, deoxycytidine, deoxyinosine, thymine, ribonebularine, 2'-O-methylnebularine, or 2'-deoxynebularine
  misc_difference 102: note = a, c, g, inosine, u, deoxyadenosine, deoxyguanosine, deoxycytidine, deoxyinosine, thymine, ribonebularine, 2'-O-methylnebularine, or 2'-deoxynebularine
  misc_difference 103: note = a, c, g, inosine, u, deoxyadenosine, deoxyguanosine, deoxycytidine, deoxyinosine, thymine, ribonebularine, 2'-O-methylnebularine, or 2'-deoxynebularine

SEQ ID NO: 2829 - RNA, 103 nt, synthetic construct; identical to SEQ ID NO: 1797
  source 1..103: mol_type = other RNA
  modified_base 1: mod_base = OTHER; note = 2'-O-Methyl-cytidine phosphorothioate
  modified_base 2: mod_base = OTHER; note = 2'-O-Methyl-adenosine phosphorothioate
  modified_base 3: mod_base = OTHER; note = 2'-O-Methyl-guanosine phosphorothioate
  modified_base 21: mod_base = OTHER; note = 2'-O-Methyl-guanosine
  modified_base 25: mod_base = OTHER; note = uridine phosphorothioate
  modified_base 28: mod_base = OTHER; note = 2'-O-Methyl-adenosine
  modified_base 29: mod_base = OTHER; note = 2'-O-Methyl-guanosine
  modified_base 30: mod_base = OTHER; note = 2'-O-Methyl-cytidine
  modified_base 31: mod_base = OTHER; note = 2'-O-Methyl-uridine
  modified_base 32: mod_base = OTHER; note = 2'-O-Methyl-adenosine
  modified_base 33: mod_base = OTHER; note = 2'-O-Methyl-guanosine
  modified_base 34: mod_base = OTHER; note = 2'-O-Methyl-adenosine
  modified_base 35: mod_base = OTHER; note = 2'-O-Methyl-adenosine
  modified_base 36: mod_base = OTHER; note = 2'-O-Methyl-adenosine
  modified_base 37: mod_base = OTHER; note = 2'-O-Methyl-uridine
  modified_base 38: mod_base = OTHER; note = 2'-O-Methyl-adenosine
  modified_base 39: mod_base = OTHER; note = 2'-O-Methyl-guanosine
  modified_base 40: mod_base = OTHER; note = 2'-O-Methyl-cytidine
  modified_base 41: mod_base = OTHER; note = 2'-O-Methyl-adenosine
  modified_base 42: mod_base = OTHER; note = 2'-O-Methyl-adenosine
  modified_base 46: mod_base = OTHER; note = 2'-O-Methyl-adenosine
  modified_base 48: mod_base = OTHER; note = 2'-O-Methyl-adenosine
  modified_base 50: mod_base = OTHER; note = 2'-O-Methyl-uridine
  modified_base 52: mod_base = OTHER; note = 2'-O-Methyl-adenosine
  modified_base 53: mod_base = OTHER; note = 2'-O-Methyl-guanosine
  modified_base 54: mod_base = OTHER; note = 2'-O-Methyl-guanosine
  modified_base 57: mod_base = OTHER; note = 2'-O-Methyl-adenosine
  modified_base 61: mod_base = OTHER; note = 2'-O-Methyl-cytidine
  modified_base 64: mod_base = OTHER; note = uridine phosphorothioate
  modified_base 66: mod_base = OTHER; note = 2'-O-Methyl-uridine
  modified_base 67: mod_base = OTHER; note = 2'-O-Methyl-cytidine
  modified_base 70: mod_base = OTHER; note = 2'-O-Methyl-cytidine
  modified_base 71: mod_base = OTHER; note = 2'-O-Methyl-uridine
  modified_base 72: mod_base = OTHER; note = 2'-O-Methyl-uridine
  modified_base 74: mod_base = OTHER; note = 2'-O-Methyl-adenosine
  modified_base 75: mod_base = OTHER; note = 2'-O-Methyl-adenosine
  modified_base 76: mod_base = OTHER; note = 2'-O-Methyl-adenosine
  modified_base 77: mod_base = OTHER; note = 2'-O-Methyl-adenosine
  modified_base 78: mod_base = OTHER; note = 2'-O-Methyl-adenosine
  modified_base 79: mod_base = OTHER; note = 2'-O-Methyl-guanosine
  modified_base 80: mod_base = OTHER; note = 2'-O-Methyl-uridine
  modified_base 82: mod_base = OTHER; note = 2'-O-Methyl-guanosine
  modified_base 83: mod_base = OTHER; note = 2'-O-Methyl-cytidine
  modified_base 84: mod_base = OTHER; note = 2'-O-Methyl-adenosine
  modified_base 85: mod_base = OTHER; note = 2'-O-Methyl-cytidine
  modified_base 86: mod_base = OTHER; note = 2'-O-Methyl-cytidine
  modified_base 87: mod_base = OTHER; note = 2'-O-Methyl-guanosine
  modified_base 89: mod_base = OTHER; note = 2'-O-Methyl-guanosine
  modified_base 92: mod_base = OTHER; note = 2'-O-Methyl-guanosine
  modified_base 93: mod_base = OTHER; note = 2'-O-Methyl-guanosine
  modified_base 94: mod_base = OTHER; note = 2'-O-Methyl-uridine
  modified_base 95: mod_base = OTHER; note = 2'-O-Methyl-guanosine
  modified_base 96: mod_base = OTHER; note = 2'-O-Methyl-cytidine
  modified_base 97: mod_base = OTHER; note = 2'-O-Methyl-uridine phosphorothioate
  modified_base 98: mod_base = OTHER; note = 2'-O-Methyl-uridine phosphorothioate
  modified_base 99: mod_base = OTHER; note = 2'-O-Methyl-uridine phosphorothioate
  modified_base 100: mod_base = OTHER; note = 2'-O-Methyl-uridine
  misc_difference 101: note = a, c, g, inosine, u, deoxyadenosine, deoxyguanosine, deoxycytidine, deoxyinosine, thymine, ribonebularine, 2'-O-methylnebularine, or 2'-deoxynebularine
  misc_difference 102: note = a, c, g, inosine, u, deoxyadenosine, deoxyguanosine, deoxycytidine, deoxyinosine, thymine, ribonebularine, 2'-O-methylnebularine, or 2'-deoxynebularine
  misc_difference 103: note = a, c, g, inosine, u, deoxyadenosine, deoxyguanosine, deoxycytidine, deoxyinosine, thymine, ribonebularine, 2'-O-methylnebularine, or 2'-deoxynebularine

SEQ ID NO: 2830 - RNA, 103 nt, synthetic construct; identical to SEQ ID NO: 1797
  source 1..103: mol_type = other RNA
  modified_base 1: mod_base = OTHER; note = 2'-O-Methyl-cytidine phosphorothioate
  modified_base 2: mod_base = OTHER; note = 2'-O-Methyl-adenosine phosphorothioate
  modified_base 3: mod_base = OTHER; note = 2'-O-Methyl-guanosine phosphorothioate
  modified_base 21: mod_base = OTHER; note = 2'-O-Methyl-guanosine
  modified_base 25: mod_base = OTHER; note = uridine phosphorothioate
  modified_base 28: mod_base = OTHER; note = 2'-O-Methyl-adenosine
  modified_base 29: mod_base = OTHER; note = 2'-O-Methyl-guanosine
  modified_base 30: mod_base = OTHER; note = 2'-O-Methyl-cytidine
  modified_base 31: mod_base = OTHER; note = 2'-O-Methyl-uridine
  modified_base 32: mod_base = OTHER; note = 2'-O-Methyl-adenosine
  modified_base 33: mod_base = OTHER; note = 2'-O-Methyl-guanosine
  modified_base 34: mod_base = OTHER; note = 2'-O-Methyl-adenosine
  modified_base 35: mod_base = OTHER; note = 2'-O-Methyl-adenosine
  modified_base 36: mod_base = OTHER; note = 2'-O-Methyl-adenosine
  modified_base 37: mod_base = OTHER; note = 2'-O-Methyl-uridine
  modified_base 38: mod_base = OTHER; note = 2'-O-Methyl-adenosine
  modified_base 39: mod_base = OTHER; note = 2'-O-Methyl-guanosine
  modified_base 40: mod_base = OTHER; note = 2'-O-Methyl-cytidine
  modified_base 41: mod_base = OTHER; note = 2'-O-Methyl-adenosine
  modified_base 42: mod_base = OTHER; note = 2'-O-Methyl-adenosine
  modified_base 46: mod_base = OTHER; note = 2'-O-Methyl-adenosine
  modified_base 48: mod_base = OTHER; note = 2'-O-Methyl-adenosine
  modified_base 50: mod_base = OTHER; note = 2'-O-Methyl-uridine
  modified_base 52: mod_base = OTHER; note = 2'-O-Methyl-adenosine
  modified_base 53: mod_base = OTHER; note = 2'-O-Methyl-guanosine
  modified_base 54: mod_base = OTHER; note = 2'-O-Methyl-guanosine
  modified_base 55: mod_base = OTHER; note = 2'-O-Methyl-cytidine
  modified_base 56: mod_base = OTHER; note = 2'-O-Methyl-uridine
  modified_base 57: mod_base = OTHER; note = 2'-O-Methyl-adenosine
  modified_base 60: mod_base = OTHER; note = 2'-O-Methyl-cytidine
  modified_base 61: mod_base = OTHER; note = 2'-O-Methyl-cytidine
  modified_base 64: mod_base = OTHER; note = uridine phosphorothioate
  modified_base 66: mod_base = OTHER; note = 2'-O-Methyl-uridine
  modified_base 67: mod_base = OTHER; note = 2'-O-Methyl-cytidine
  modified_base 70: mod_base = OTHER; note = 2'-O-Methyl-cytidine
  modified_base 71: mod_base = OTHER; note = 2'-O-Methyl-uridine
  modified_base 72: mod_base = OTHER; note = 2'-O-Methyl-uridine
  modified_base 74: mod_base = OTHER; note = 2'-O-Methyl-adenosine
  modified_base 75: mod_base = OTHER; note = 2'-O-Methyl-adenosine
  modified_base 76: mod_base = OTHER; note = 2'-O-Methyl-adenosine
  modified_base 77: mod_base = OTHER; note = 2'-O-Methyl-adenosine
  modified_base 78: mod_base = OTHER; note = 2'-O-Methyl-adenosine
  modified_base 79: mod_base = OTHER; note = 2'-O-Methyl-guanosine
  modified_base 80: mod_base = OTHER; note = 2'-O-Methyl-uridine
  modified_base 82: mod_base = OTHER; note = 2'-O-Methyl-guanosine
  modified_base 83: mod_base = OTHER; note = 2'-O-Methyl-cytidine
  modified_base 84: mod_base = OTHER; note = 2'-O-Methyl-adenosine
  modified_base 85: mod_base = OTHER; note = 2'-O-Methyl-cytidine
  modified_base 86: mod_base = OTHER; note = 2'-O-Methyl-cytidine
  modified_base 87: mod_base = OTHER; note = 2'-O-Methyl-guanosine
  modified_base 89: mod_base = OTHER; note = 2'-O-Methyl-guanosine
  modified_base 92: mod_base = OTHER; note = 2'-O-Methyl-guanosine
  modified_base 93: mod_base = OTHER; note = 2'-O-Methyl-guanosine
  modified_base 94: mod_base = OTHER; note = 2'-O-Methyl-uridine
  modified_base 95: mod_base = OTHER; note = 2'-O-Methyl-guanosine
  modified_base 96: mod_base = OTHER; note = 2'-O-Methyl-cytidine
  modified_base 97: mod_base = OTHER; note = 2'-O-Methyl-uridine phosphorothioate
  modified_base 98: mod_base = OTHER; note = 2'-O-Methyl-uridine phosphorothioate
  modified_base 99: mod_base = OTHER; note = 2'-O-Methyl-uridine phosphorothioate
  modified_base 100: mod_base = OTHER; note = 2'-O-Methyl-uridine
  misc_difference 101: note = a, c, g, inosine, u, deoxyadenosine, deoxyguanosine, deoxycytidine, deoxyinosine, thymine, ribonebularine, 2'-O-methylnebularine, or 2'-deoxynebularine
  misc_difference 102: note = a, c, g, inosine, u, deoxyadenosine, deoxyguanosine, deoxycytidine, deoxyinosine, thymine, ribonebularine, 2'-O-methylnebularine, or 2'-deoxynebularine
  misc_difference 103: note = a, c, g, inosine, u, deoxyadenosine, deoxyguanosine, deoxycytidine, deoxyinosine, thymine, ribonebularine, 2'-O-methylnebularine, or 2'-deoxynebularine

SEQ ID NO: 2831 - RNA, 103 nt, synthetic construct; identical to SEQ ID NO: 1797
  source 1..103: mol_type = other RNA
  modified_base 1: mod_base = OTHER; note = 2'-O-Methyl-cytidine phosphorothioate
  modified_base 2: mod_base = OTHER; note = 2'-O-Methyl-adenosine phosphorothioate
  modified_base 3: mod_base = OTHER; note = 2'-O-Methyl-guanosine phosphorothioate
  modified_base 21: mod_base = OTHER; note = 2'-O-Methyl-guanosine
  modified_base 25: mod_base = OTHER; note = uridine phosphorothioate
  modified_base 28: mod_base = OTHER; note = 2'-O-Methyl-adenosine
  modified_base 29: mod_base = OTHER; note = 2'-O-Methyl-guanosine
  modified_base 30: mod_base = OTHER; note = 2'-O-Methyl-cytidine
  modified_base 31: mod_base = OTHER; note = 2'-O-Methyl-uridine
  modified_base 32: mod_base = OTHER; note = 2'-O-Methyl-adenosine
  modified_base 33: mod_base = OTHER; note = 2'-O-Methyl-guanosine
  modified_base 34: mod_base = OTHER; note = 2'-O-Methyl-adenosine
  modified_base 35: mod_base = OTHER; note = 2'-O-Methyl-adenosine
  modified_base 36: mod_base = OTHER; note = 2'-O-Methyl-adenosine
  modified_base 37: mod_base = OTHER; note = 2'-O-Methyl-uridine
  modified_base 38: mod_base = OTHER; note = 2'-O-Methyl-adenosine
  modified_base 39: mod_base = OTHER; note = 2'-O-Methyl-guanosine
  modified_base 40: mod_base = OTHER; note = 2'-O-Methyl-cytidine
  modified_base 41: mod_base = OTHER; note = 2'-O-Methyl-adenosine
  modified_base 42: mod_base = OTHER; note = 2'-O-Methyl-adenosine
  modified_base 46: mod_base = OTHER; note = 2'-O-Methyl-adenosine
  modified_base 48: mod_base = OTHER; note = 2'-O-Methyl-adenosine
  modified_base 50: mod_base = OTHER; note = 2'-O-Methyl-uridine
  modified_base 52: mod_base = OTHER; note = 2'-O-Methyl-adenosine
  modified_base 53: mod_base = OTHER; note = 2'-O-Methyl-guanosine
  modified_base 54: mod_base = OTHER; note = 2'-O-Methyl-guanosine
  modified_base 57: mod_base = OTHER; note = 2'-O-Methyl-adenosine
  modified_base 61: mod_base = OTHER; note = 2'-O-Methyl-cytidine
  modified_base 64: mod_base = OTHER; note = uridine phosphorothioate
  modified_base 66: mod_base = OTHER; note = 2'-O-Methyl-uridine
  modified_base 67: mod_base = OTHER; note = 2'-O-Methyl-cytidine
  modified_base 70: mod_base = OTHER; note = 2'-O-Methyl-cytidine
  modified_base 71: mod_base = OTHER; note = 2'-O-Methyl-uridine
  modified_base 72: mod_base = OTHER; note = 2'-O-Methyl-uridine
  modified_base 73: mod_base = OTHER; note = 2'-O-Methyl-guanosine
  modified_base 74: mod_base = OTHER; note = 2'-O-Methyl-adenosine
  modified_base 75: mod_base = OTHER; note = 2'-O-Methyl-adenosine
  modified_base 76: mod_base = OTHER; note = 2'-O-Methyl-adenosine
  modified_base 77: mod_base = OTHER; note = 2'-O-Methyl-adenosine
  modified_base 78: mod_base = OTHER; note = 2'-O-Methyl-adenosine
  modified_base 79: mod_base = OTHER; note = 2'-O-Methyl-guanosine
  modified_base 80: mod_base = OTHER; note = 2'-O-Methyl-uridine
  modified_base 82: mod_base = OTHER; note = 2'-O-Methyl-guanosine
  modified_base 83: mod_base = OTHER; note = 2'-O-Methyl-cytidine
  modified_base 84: mod_base = OTHER; note = 2'-O-Methyl-adenosine
  modified_base 85: mod_base = OTHER; note = 2'-O-Methyl-cytidine
  modified_base 86: mod_base = OTHER; note = 2'-O-Methyl-cytidine
  modified_base 87: mod_base = OTHER; note = 2'-O-Methyl-guanosine
  modified_base 89: mod_base = OTHER; note = 2'-O-Methyl-guanosine
  modified_base 92: mod_base = OTHER; note = 2'-O-Methyl-guanosine
  modified_base 93: mod_base = OTHER; note = 2'-O-Methyl-guanosine
  modified_base 94: mod_base = OTHER; note = 2'-O-Methyl-uridine
  modified_base 95: mod_base = OTHER; note = 2'-O-Methyl-guanosine
  modified_base 96: mod_base = OTHER; note = 2'-O-Methyl-cytidine
  modified_base 97: mod_base = OTHER; note = 2'-O-Methyl-uridine phosphorothioate
  modified_base 98: mod_base = OTHER; note = 2'-O-Methyl-uridine phosphorothioate
  modified_base 99: mod_base = OTHER; note = 2'-O-Methyl-uridine phosphorothioate
  modified_base 100: mod_base = OTHER; note = 2'-O-Methyl-uridine
  misc_difference 101: note = a, c, g, inosine, u, deoxyadenosine, deoxyguanosine, deoxycytidine, deoxyinosine, thymine, ribonebularine, 2'-O-methylnebularine, or 2'-deoxynebularine
  misc_difference 102: note = a, c, g, inosine, u, deoxyadenosine, deoxyguanosine, deoxycytidine, deoxyinosine, thymine, ribonebularine, 2'-O-methylnebularine, or 2'-deoxynebularine
  misc_difference 103: note = a, c, g, inosine, u, deoxyadenosine, deoxyguanosine, deoxycytidine, deoxyinosine, thymine, ribonebularine, 2'-O-methylnebularine, or 2'-deoxynebularine

SEQ ID NO: 2832 - RNA, 103 nt, synthetic construct; identical to SEQ ID NO: 1797
  source 1..103: mol_type = other RNA
  modified_base 1: mod_base = OTHER; note = 2'-O-Methyl-cytidine phosphorothioate
  modified_base 2: mod_base = OTHER; note = 2'-O-Methyl-adenosine phosphorothioate
  modified_base 3: mod_base = OTHER; note = 2'-O-Methyl-guanosine phosphorothioate
  modified_base 21: mod_base = OTHER; note = 2'-O-Methyl-guanosine
  modified_base 25: mod_base = OTHER; note = uridine phosphorothioate
  modified_base 28: mod_base = OTHER; note = 2'-O-Methyl-adenosine
  modified_base 29: mod_base = OTHER; note = 2'-O-Methyl-guanosine
  modified_base 30: mod_base = OTHER; note = 2'-O-Methyl-cytidine
  modified_base 31: mod_base = OTHER; note = 2'-O-Methyl-uridine
  modified_base 32: mod_base = OTHER; note = 2'-O-Methyl-adenosine
  modified_base 33: mod_base = OTHER; note = 2'-O-Methyl-guanosine
  modified_base 34: mod_base = OTHER; note = 2'-O-Methyl-adenosine
  modified_base 35: mod_base = OTHER; note = 2'-O-Methyl-adenosine
  modified_base 36: mod_base = OTHER; note = 2'-O-Methyl-adenosine
  modified_base 37: mod_base = OTHER; note = 2'-O-Methyl-uridine
  modified_base 38: mod_base = OTHER; note = 2'-O-Methyl-adenosine
  modified_base 39: mod_base = OTHER; note = 2'-O-Methyl-guanosine
  modified_base 40: mod_base = OTHER; note = 2'-O-Methyl-cytidine
  modified_base 41: mod_base = OTHER; note = 2'-O-Methyl-adenosine
  modified_base 42: mod_base = OTHER; note = 2'-O-Methyl-adenosine
  modified_base 46: mod_base = OTHER; note = 2'-O-Methyl-adenosine
  modified_base 48: mod_base = OTHER; note = 2'-O-Methyl-adenosine
  modified_base 50: mod_base = OTHER; note = 2'-O-Methyl-uridine
  modified_base 52: mod_base = OTHER; note = 2'-O-Methyl-adenosine
  modified_base 53: mod_base = OTHER; note = 2'-O-Methyl-guanosine
  modified_base 54: mod_base = OTHER; note = 2'-O-Methyl-guanosine
  modified_base 57: mod_base = OTHER; note = 2'-O-Methyl-adenosine
  modified_base 61: mod_base = OTHER; note = 2'-O-Methyl-cytidine
  modified_base 64: mod_base = OTHER; note = uridine phosphorothioate
  modified_base 66: mod_base = OTHER; note = 2'-O-Methyl-uridine
  modified_base 67: mod_base = OTHER; note = 2'-O-Methyl-cytidine
  modified_base 70: mod_base = OTHER; note = 2'-O-Methyl-cytidine
  modified_base 71: mod_base = OTHER; note = 2'-O-Methyl-uridine
  modified_base 72: mod_base = OTHER; note = 2'-O-Methyl-uridine
  modified_base 73: mod_base = OTHER; note = 2'-O-Methyl-guanosine
  modified_base 74: mod_base = OTHER; note = 2'-O-Methyl-adenosine
  modified_base 75: mod_base = OTHER; note = 2'-O-Methyl-adenosine
  modified_base 76: mod_base = OTHER; note = 2'-O-Methyl-adenosine
  modified_base 77: mod_base = OTHER; note = 2'-O-Methyl-adenosine
  modified_base 78: mod_base = OTHER; note = 2'-O-Methyl-adenosine
  modified_base 79: mod_base = OTHER; note = 2'-O-Methyl-guanosine
  modified_base 80: mod_base = OTHER; note = 2'-O-Methyl-uridine
  modified_base 82: mod_base = OTHER; note = 2'-O-Methyl-guanosine
  modified_base 83: mod_base = OTHER; note = 2'-O-Methyl-cytidine
  modified_base 84: mod_base = OTHER; note = 2'-O-Methyl-adenosine
  modified_base 85: mod_base = OTHER; note = 2'-O-Methyl-cytidine
  modified_base 86: mod_base = OTHER; note = 2'-O-Methyl-cytidine
  modified_base 87: mod_base = OTHER; note = 2'-O-Methyl-guanosine
  modified_base 89: mod_base = OTHER; note = 2'-O-Methyl-guanosine
  modified_base 91: mod_base = OTHER; note = 2'-O-Methyl-cytidine
  modified_base 92: mod_base = OTHER; note = 2'-O-Methyl-guanosine
  modified_base 93: mod_base = OTHER; note = 2'-O-Methyl-guanosine
  modified_base 94: mod_base = OTHER; note = 2'-O-Methyl-uridine
  modified_base 95: mod_base = OTHER; note = 2'-O-Methyl-guanosine
  modified_base 96: mod_base = OTHER; note = 2'-O-Methyl-cytidine
  modified_base 97: mod_base = OTHER; note = 2'-O-Methyl-uridine phosphorothioate
  modified_base 98: mod_base = OTHER; note = 2'-O-Methyl-uridine phosphorothioate
  modified_base 99: mod_base = OTHER; note = 2'-O-Methyl-uridine phosphorothioate
  modified_base 100: mod_base = OTHER; note = 2'-O-Methyl-uridine
  misc_difference 101: note = a, c, g, inosine, u, deoxyadenosine, deoxyguanosine, deoxycytidine, deoxyinosine, thymine, ribonebularine, 2'-O-methylnebularine, or 2'-deoxynebularine
  misc_difference 102: note = a, c, g, inosine, u, deoxyadenosine, deoxyguanosine, deoxycytidine, deoxyinosine, thymine, ribonebularine, 2'-O-methylnebularine, or 2'-deoxynebularine
  misc_difference 103: note = a, c, g, inosine, u, deoxyadenosine, deoxyguanosine, deoxycytidine, deoxyinosine, thymine, ribonebularine, 2'-O-methylnebularine, or 2'-deoxynebularine

SEQ ID NO: 2833 - RNA, 103 nt, synthetic construct; identical to SEQ ID NO: 1797
  source 1..103: mol_type = other RNA
  modified_base 1: mod_base = OTHER; note = 2'-O-Methyl-cytidine phosphorothioate
  modified_base 2: mod_base = OTHER; note = 2'-O-Methyl-adenosine phosphorothioate
  modified_base 3: mod_base = OTHER; note = 2'-O-Methyl-guanosine phosphorothioate
  modified_base 21: mod_base = OTHER; note = 2'-O-Methyl-guanosine
  modified_base 25: mod_base = OTHER; note = uridine phosphorothioate
  modified_base 28: mod_base = OTHER; note = 2'-O-Methyl-adenosine
  modified_base 29: mod_base = OTHER; note = 2'-O-Methyl-guanosine
  modified_base 30: mod_base = OTHER; note = 2'-O-Methyl-cytidine
  modified_base 31: mod_base = OTHER; note = 2'-O-Methyl-uridine
  modified_base 32: mod_base = OTHER; note = 2'-O-Methyl-adenosine
  modified_base 34: mod_base = OTHER; note = 2'-O-Methyl-adenosine
  modified_base 35: mod_base = OTHER; note = 2'-O-Methyl-adenosine
  modified_base 36: mod_base = OTHER; note = 2'-O-Methyl-adenosine
  modified_base 37: mod_base = OTHER; note = 2'-O-Methyl-uridine
  modified_base 38: mod_base = OTHER; note = 2'-O-Methyl-adenosine
  modified_base 39: mod_base = OTHER; note = 2'-O-Methyl-guanosine
  modified_base 40: mod_base = OTHER; note = 2'-O-Methyl-cytidine
  modified_base 41: mod_base = OTHER; note = 2'-O-Methyl-adenosine
  modified_base 42: mod_base = OTHER; note = 2'-O-Methyl-adenosine
  modified_base 46: mod_base = OTHER; note = 2'-O-Methyl-adenosine
  modified_base 48: mod_base = OTHER; note = 2'-O-Methyl-adenosine
  modified_base 50: mod_base = OTHER; note = 2'-O-Methyl-uridine
  modified_base 52: mod_base = OTHER; note = 2'-O-Methyl-adenosine
  modified_base 53: mod_base = OTHER; note = 2'-O-Methyl-guanosine
  modified_base 54: mod_base = OTHER; note = 2'-O-Methyl-guanosine
  modified_base 57: mod_base = OTHER; note = 2'-O-Methyl-adenosine
  modified_base 61: mod_base = OTHER; note = 2'-O-Methyl-cytidine
  modified_base 64: mod_base = OTHER; note = uridine phosphorothioate
  modified_base 66: mod_base = OTHER; note = 2'-O-Methyl-uridine
  modified_base 67: mod_base = OTHER; note = 2'-O-Methyl-cytidine
  modified_base 70: mod_base = OTHER; note = 2'-O-Methyl-cytidine
  modified_base 71: mod_base = OTHER; note = 2'-O-Methyl-uridine
  modified_base 72: mod_base = OTHER; note = 2'-O-Methyl-uridine
  modified_base 73: mod_base = OTHER; note = 2'-O-Methyl-guanosine
  modified_base 74: mod_base = OTHER; note = 2'-O-Methyl-adenosine
  modified_base 75: mod_base = OTHER; note = 2'-O-Methyl-adenosine
  modified_base 76: mod_base = OTHER; note = 2'-O-Methyl-adenosine
  modified_base 77: mod_base = OTHER; note = 2'-O-Methyl-adenosine
  modified_base 78: mod_base = OTHER; note = 2'-O-Methyl-adenosine
  modified_base 79: mod_base = OTHER; note = 2'-O-Methyl-guanosine
  modified_base 80: mod_base = OTHER; note = 2'-O-Methyl-uridine
  modified_base 82: mod_base = OTHER; note = 2'-O-Methyl-guanosine
  modified_base 83: mod_base = OTHER; note = 2'-O-Methyl-cytidine
  modified_base 84: mod_base = OTHER; note = 2'-O-Methyl-adenosine
  modified_base 85: mod_base = OTHER; note = 2'-O-Methyl-cytidine
  modified_base 86: mod_base = OTHER; note = 2'-O-Methyl-cytidine
  modified_base 87: mod_base = OTHER; note = 2'-O-Methyl-guanosine
  modified_base 89: mod_base = OTHER; note = 2'-O-Methyl-guanosine
  modified_base 92: mod_base = OTHER; note = 2'-O-Methyl-guanosine
  modified_base 93: mod_base = OTHER; note = 2'-O-Methyl-guanosine
  modified_base 94: mod_base = OTHER; note = 2'-O-Methyl-uridine
  modified_base 95: mod_base = OTHER; note = 2'-O-Methyl-guanosine
  modified_base 96: mod_base = OTHER; note = 2'-O-Methyl-cytidine
  modified_base 97: mod_base = OTHER; note = 2'-O-Methyl-uridine phosphorothioate
  modified_base 98: mod_base = OTHER; note = 2'-O-Methyl-uridine phosphorothioate
  modified_base 99: mod_base = OTHER; note = 2'-O-Methyl-uridine phosphorothioate
  modified_base 100: mod_base = OTHER; note = 2'-O-Methyl-uridine
  misc_difference 101: note = a, c, g, inosine, u, deoxyadenosine, deoxyguanosine, deoxycytidine, deoxyinosine, thymine, ribonebularine, 2'-O-methylnebularine, or 2'-deoxynebularine
  misc_difference 102: note = a, c, g, inosine, u, deoxyadenosine, deoxyguanosine, deoxycytidine, deoxyinosine, thymine, ribonebularine, 2'-O-methylnebularine, or 2'-deoxynebularine
  misc_difference 103: note = a, c, g, inosine, u, deoxyadenosine, deoxyguanosine, deoxycytidine, deoxyinosine, thymine, ribonebularine, 2'-O-methylnebularine, or 2'-deoxynebularine

SEQ ID NO: 2834 - RNA, 103 nt, synthetic construct; identical to SEQ ID NO: 1797
  source 1..103: mol_type = other RNA
  modified_base 1: mod_base = OTHER; note = 2'-O-Methyl-cytidine phosphorothioate
  modified_base 2: mod_base = OTHER; note = 2'-O-Methyl-adenosine phosphorothioate
  modified_base 3: mod_base = OTHER; note = 2'-O-Methyl-guanosine phosphorothioate
  modified_base 21: mod_base = OTHER; note = 2'-O-Methyl-guanosine
  modified_base 25: mod_base = OTHER; note = uridine phosphorothioate
  modified_base 28: mod_base = OTHER; note = 2'-O-Methyl-adenosine
  modified_base 29: mod_base = OTHER; note = 2'-O-Methyl-guanosine
  modified_base 30: mod_base = OTHER; note = 2'-O-Methyl-cytidine
  modified_base 31: mod_base = OTHER; note = 2'-O-Methyl-uridine
  modified_base 32: mod_base = OTHER; note = 2'-O-Methyl-adenosine
  modified_base 34: mod_base = OTHER; note = 2'-O-Methyl-adenosine
  modified_base 35: mod_base = OTHER; note = 2'-O-Methyl-adenosine
  modified_base 36: mod_base = OTHER; note = 2'-O-Methyl-adenosine
  modified_base 37: mod_base = OTHER; note = 2'-O-Methyl-uridine
  modified_base 38: mod_base = OTHER; note = 2'-O-Methyl-adenosine
  modified_base 39: mod_base = OTHER; note = 2'-O-Methyl-guanosine
  modified_base 40: mod_base = OTHER; note = 2'-O-Methyl-cytidine
  modified_base 41: mod_base = OTHER; note = 2'-O-Methyl-adenosine
  modified_base 42: mod_base = OTHER; note = 2'-O-Methyl-adenosine
  modified_base 46: mod_base = OTHER; note = 2'-O-Methyl-adenosine
  modified_base 48: mod_base = OTHER; note = 2'-O-Methyl-adenosine
  modified_base 50: mod_base = OTHER; note = 2'-O-Methyl-uridine
  modified_base 52: mod_base = OTHER; note = 2'-O-Methyl-adenosine
  modified_base 53: mod_base = OTHER; note = 2'-O-Methyl-guanosine
  modified_base 54: mod_base = OTHER; note = 2'-O-Methyl-guanosine
  modified_base 57: mod_base = OTHER; note = 2'-O-Methyl-adenosine
  modified_base 61: mod_base = OTHER; note = 2'-O-Methyl-cytidine
  modified_base 64: mod_base = OTHER; note = uridine phosphorothioate
  modified_base 66: mod_base = OTHER; note = 2'-O-Methyl-uridine
  modified_base 67: mod_base = OTHER; note = 2'-O-Methyl-cytidine
  modified_base 70: mod_base = OTHER; note = 2'-O-Methyl-cytidine
  modified_base 71: mod_base = OTHER; note = 2'-O-Methyl-uridine
  modified_base 72: mod_base = OTHER; note = 2'-O-Methyl-uridine
  modified_base 73: mod_base = OTHER; note = 2'-O-Methyl-guanosine
  modified_base 74: mod_base = OTHER; note = 2'-O-Methyl-adenosine
  modified_base 75: mod_base = OTHER; note = 2'-O-Methyl-adenosine
  modified_base 76: mod_base = OTHER; note = 2'-O-Methyl-adenosine
  modified_base 77: mod_base = OTHER; note = 2'-O-Methyl-adenosine
  modified_base 78: mod_base = OTHER; note = 2'-O-Methyl-adenosine
  modified_base 79: mod_base = OTHER; note = 2'-O-Methyl-guanosine
  modified_base 80: mod_base = OTHER; note = 2'-O-Methyl-uridine
  modified_base 82: mod_base = OTHER; note = 2'-O-Methyl-guanosine
  modified_base 83: mod_base = OTHER; note = 2'-O-Methyl-cytidine
  modified_base 84: mod_base = OTHER; note = 2'-O-Methyl-adenosine
  modified_base 85: mod_base = OTHER; note = 2'-O-Methyl-cytidine
  modified_base 86: mod_base = OTHER; note = 2'-O-Methyl-cytidine
  modified_base 87: mod_base = OTHER; note = 2'-O-Methyl-guanosine
  modified_base 89: mod_base = OTHER; note = 2'-O-Methyl-guanosine
  modified_base 91: mod_base = OTHER; note = 2'-O-Methyl-cytidine
  modified_base 92: mod_base = OTHER; note = 2'-O-Methyl-guanosine
  modified_base 93: mod_base = OTHER; note = 2'-O-Methyl-guanosine
  modified_base 94: mod_base = OTHER; note = 2'-O-Methyl-uridine
  modified_base 95: mod_base = OTHER; note = 2'-O-Methyl-guanosine
  modified_base 96: mod_base = OTHER; note = 2'-O-Methyl-cytidine
  modified_base 97: mod_base = OTHER; note = 2'-O-Methyl-uridine phosphorothioate
  modified_base 98: mod_base = OTHER; note = 2'-O-Methyl-uridine phosphorothioate
  modified_base 99: mod_base = OTHER; note = 2'-O-Methyl-uridine phosphorothioate
  modified_base 100: mod_base = OTHER; note = 2'-O-Methyl-uridine
  misc_difference 101: note = a, c, g, inosine, u, deoxyadenosine, deoxyguanosine, deoxycytidine, deoxyinosine, thymine, ribonebularine, 2'-O-methylnebularine, or 2'-deoxynebularine
  misc_difference 102: note = a, c, g, inosine, u, deoxyadenosine, deoxyguanosine, deoxycytidine, deoxyinosine, thymine, ribonebularine, 2'-O-methylnebularine, or 2'-deoxynebularine
  misc_difference 103: note = a, c, g, inosine, u, deoxyadenosine, deoxyguanosine, deoxycytidine, deoxyinosine, thymine, ribonebularine, 2'-O-methylnebularine, or 2'-deoxynebularine

SEQ ID NO: 2835 - RNA, 103 nt, synthetic construct; identical to SEQ ID NO: 1797
  source 1..103: mol_type = other RNA
  modified_base 1: mod_base = OTHER; note = 2'-O-Methyl-cytidine phosphorothioate
  modified_base 2: mod_base = OTHER; note = 2'-O-Methyl-adenosine phosphorothioate
  modified_base 3: mod_base = OTHER; note = 2'-O-Methyl-guanosine phosphorothioate
  modified_base 21: mod_base = OTHER; note = 2'-O-Methyl-guanosine
  modified_base 25: mod_base = OTHER; note = uridine phosphorothioate
  modified_base 28: mod_base = OTHER; note = 2'-O-Methyl-adenosine
  modified_base 29: mod_base = OTHER; note = 2'-O-Methyl-guanosine
  modified_base 30: mod_base = OTHER; note = 2'-O-Methyl-cytidine
  modified_base 31: mod_base = OTHER; note = 2'-O-Methyl-uridine
  modified_base 32: mod_base = OTHER; note = 2'-O-Methyl-adenosine
  modified_base 34: mod_base = OTHER; note = 2'-O-Methyl-adenosine
  modified_base 35: mod_base = OTHER; note = 2'-O-Methyl-adenosine
  modified_base 36: mod_base = OTHER; note = 2'-O-Methyl-adenosine
  modified_base 37: mod_base = OTHER; note = 2'-O-Methyl-uridine
  modified_base 38: mod_base = OTHER; note = 2'-O-Methyl-adenosine
  modified_base 39: mod_base = OTHER; note = 2'-O-Methyl-guanosine
  modified_base 40: mod_base = OTHER; note = 2'-O-Methyl-cytidine
  modified_base 41: mod_base = OTHER; note = 2'-O-Methyl-adenosine
  modified_base 42: mod_base = OTHER; note = 2'-O-Methyl-adenosine
  modified_base 46: mod_base = OTHER; note = 2'-O-Methyl-adenosine
  modified_base 48: mod_base = OTHER; note = 2'-O-Methyl-adenosine
  modified_base 50: mod_base = OTHER; note = 2'-O-Methyl-uridine
  modified_base 52: mod_base = OTHER; note = 2'-O-Methyl-adenosine
  modified_base 53: mod_base = OTHER; note = 2'-O-Methyl-guanosine
  modified_base 54: mod_base = OTHER; note = 2'-O-Methyl-guanosine
  modified_base 55: mod_base = OTHER; note = 2'-O-Methyl-cytidine
  modified_base 56: mod_base = OTHER; note = 2'-O-Methyl-uridine
  modified_base 57: mod_base = OTHER; note = 2'-O-Methyl-adenosine
  modified_base 60: mod_base = OTHER; note = 2'-O-Methyl-cytidine
  modified_base 61: mod_base = OTHER; note = 2'-O-Methyl-cytidine
  modified_base 64: mod_base = OTHER; note = uridine phosphorothioate
  modified_base 66: mod_base = OTHER; note = 2'-O-Methyl-uridine
  modified_base 67: mod_base = OTHER; note = 2'-O-Methyl-cytidine
  modified_base 70: mod_base = OTHER; note = 2'-O-Methyl-cytidine
  modified_base 71: mod_base = OTHER; note = 2'-O-Methyl-uridine
  modified_base 72: mod_base = OTHER; note = 2'-O-Methyl-uridine
  modified_base 74: mod_base = OTHER; note = 2'-O-Methyl-adenosine
  modified_base 75: mod_base = OTHER; note = 2'-O-Methyl-adenosine
  modified_base 76: mod_base = OTHER; note = 2'-O-Methyl-adenosine
  modified_base 77: mod_base = OTHER; note = 2'-O-Methyl-adenosine
  modified_base 78: mod_base = OTHER; note = 2'-O-Methyl-adenosine
  modified_base 79: mod_base = OTHER; note = 2'-O-Methyl-guanosine
  modified_base 80: mod_base = OTHER; note = 2'-O-Methyl-uridine
  modified_base 82: mod_base = OTHER; note = 2'-O-Methyl-guanosine
  modified_base 83: mod_base = OTHER; note = 2'-O-Methyl-cytidine
  modified_base 84: mod_base = OTHER; note = 2'-O-Methyl-adenosine
  modified_base 85: mod_base = OTHER; note = 2'-O-Methyl-cytidine
  modified_base 86: mod_base = OTHER; note = 2'-O-Methyl-cytidine
  modified_base 87: mod_base = OTHER; note = 2'-O-Methyl-guanosine
  modified_base 89: mod_base = OTHER; note = 2'-O-Methyl-guanosine
  modified_base 92: mod_base = OTHER; note = 2'-O-Methyl-guanosine
  modified_base 93: mod_base = OTHER; note = 2'-O-Methyl-guanosine
  modified_base 94: mod_base = OTHER; note = 2'-O-Methyl-uridine
  modified_base 95: mod_base = OTHER; note = 2'-O-Methyl-guanosine
  modified_base 96: mod_base = OTHER; note = 2'-O-Methyl-cytidine
  modified_base 97: mod_base = OTHER; note = 2'-O-Methyl-uridine phosphorothioate
  modified_base 98: mod_base = OTHER; note = 2'-O-Methyl-uridine phosphorothioate
  modified_base 99: mod_base = OTHER; note = 2'-O-Methyl-uridine phosphorothioate
  modified_base 100: mod_base = OTHER; note = 2'-O-Methyl-uridine
  misc_difference 101: note = a, c, g, inosine, u, deoxyadenosine, deoxyguanosine, deoxycytidine, deoxyinosine, thymine, ribonebularine, 2'-O-methylnebularine, or 2'-deoxynebularine
  misc_difference 102: note = a, c, g, inosine, u, deoxyadenosine, deoxyguanosine, deoxycytidine, deoxyinosine, thymine, ribonebularine, 2'-O-methylnebularine, or 2'-deoxynebularine
  misc_difference 103: note = a, c, g, inosine, u, deoxyadenosine, deoxyguanosine, deoxycytidine, deoxyinosine, thymine, ribonebularine, 2'-O-methylnebularine, or 2'-deoxynebularine

SEQ ID NO: 2836 - RNA, 103 nt, synthetic construct; identical to SEQ ID NO: 1795
  source 1..103: mol_type = other RNA
  modified_base 1: mod_base = OTHER; note = 2'-O-Methyl-cytidine phosphorothioate
  modified_base 2: mod_base = OTHER; note = 2'-O-Methyl-cytidine phosphorothioate
  modified_base 3: mod_base = OTHER; note = 2'-O-Methyl-cytidine phosphorothioate
  modified_base 21: mod_base = OTHER; note = 2'-O-Methyl-guanosine
  modified_base 25: mod_base = OTHER; note = uridine phosphorothioate
  modified_base 28: mod_base = OTHER; note = 2'-O-Methyl-adenosine
  modified_base 29: mod_base = OTHER; note = 2'-O-Methyl-guanosine
  modified_base 30: mod_base = OTHER; note = 2'-O-Methyl-cytidine
  modified_base 31: mod_base = OTHER; note = 2'-O-Methyl-uridine
  modified_base 32: mod_base = OTHER; note = 2'-O-Methyl-adenosine
  modified_base 33: mod_base = OTHER; note = 2'-O-Methyl-guanosine
  modified_base 34: mod_base = OTHER; note = 2'-O-Methyl-adenosine
  modified_base 35: mod_base = OTHER; note = 2'-O-Methyl-adenosine
  modified_base 36: mod_base = OTHER; note = 2'-O-Methyl-adenosine
  modified_base 37: mod_base = OTHER; note = 2'-O-Methyl-uridine
  modified_base 38: mod_base = OTHER; note = 2'-O-Methyl-adenosine
  modified_base 39: mod_base = OTHER; note = 2'-O-Methyl-guanosine
  modified_base 40: mod_base = OTHER; note = 2'-O-Methyl-cytidine
  modified_base 41: mod_base = OTHER; note = 2'-O-Methyl-adenosine
  modified_base 42: mod_base = OTHER; note = 2'-O-Methyl-adenosine
  modified_base 45: mod_base = OTHER; note = uridine phosphorothioate
  modified_base 46: mod_base = OTHER; note = 2'-O-Methyl-adenosine
  modified_base 48: mod_base = OTHER; note = 2'-O-Methyl-adenosine
  modified_base 50: mod_base = OTHER; note = 2'-O-Methyl-uridine
  modified_base 52: mod_base = OTHER; note = 2'-O-Methyl-adenosine
  modified_base 53: mod_base = OTHER; note = 2'-O-Methyl-guanosine
  modified_base 54: mod_base = OTHER; note = 2'-O-Methyl-guanosine
  modified_base 55: mod_base = OTHER; note = 2'-O-Methyl-cytidine
  modified_base 56: mod_base = OTHER; note = 2'-O-Methyl-uridine
  modified_base 57: mod_base = OTHER; note = 2'-O-Methyl-adenosine
  modified_base 60: mod_base = OTHER; note = 2'-O-Methyl-cytidine
  modified_base 61: mod_base = OTHER; note = 2'-O-Methyl-cytidine
  modified_base 64: mod_base = OTHER; note = uridine phosphorothioate
  modified_base 66: mod_base = OTHER; note = 2'-O-Methyl-uridine
  modified_base 67: mod_base = OTHER; note = 2'-O-Methyl-cytidine
  modified_base 70: mod_base = OTHER; note = 2'-O-Methyl-cytidine
  modified_base 71: mod_base = OTHER; note = 2'-O-Methyl-uridine
  modified_base 72: mod_base = OTHER; note = 2'-O-Methyl-uridine
  modified_base 73: mod_base = OTHER; note = 2'-O-Methyl-guanosine
  modified_base 74: mod_base = OTHER; note = 2'-O-Methyl-adenosine
  modified_base 75: mod_base = OTHER; note = 2'-O-Methyl-adenosine
  modified_base 76: mod_base = OTHER; note = 2'-O-Methyl-adenosine
  modified_base 77: mod_base = OTHER; note = 2'-O-Methyl-adenosine
  modified_base 78: mod_base = OTHER; note = 2'-O-Methyl-adenosine
  modified_base 79: mod_base = OTHER; note = 2'-O-Methyl-guanosine
  modified_base 80: mod_base = OTHER; note = 2'-O-Methyl-uridine
  modified_base 81: mod_base = OTHER; note = 2'-O-Methyl-guanosine
  modified_base 83: mod_base = OTHER; note = 2'-O-Methyl-cytidine
  modified_base 84: mod_base = OTHER; note = 2'-O-Methyl-adenosine
  modified_base 85: mod_base = OTHER; note = 2'-O-Methyl-cytidine
  modified_base 86: mod_base = OTHER; note = 2'-O-Methyl-cytidine
  modified_base 87: mod_base = OTHER; note = 2'-O-Methyl-guanosine
  modified_base 88: mod_base = OTHER; note = 2'-O-Methyl-adenosine
  modified_base 89: mod_base = OTHER; note = 2'-O-Methyl-guanosine
  modified_base 90: mod_base = OTHER; note = 2'-O-Methyl-uridine
  modified_base 91: mod_base = OTHER; note = 2'-O-Methyl-cytidine
  modified_base 92: mod_base = OTHER; note = 2'-O-Methyl-guanosine
  modified_base 93: mod_base = OTHER; note = 2'-O-Methyl-guanosine
  modified_base 94: mod_base = OTHER; note = 2'-O-Methyl-uridine
  modified_base 95: mod_base = OTHER; note = 2'-O-Methyl-guanosine
  modified_base 96: mod_base = OTHER; note = 2'-O-Methyl-cytidine
  modified_base 97: mod_base = OTHER; note = 2'-O-Methyl-uridine phosphorothioate
  modified_base 98: mod_base = OTHER; note = 2'-O-Methyl-uridine phosphorothioate
  modified_base 99: mod_base = OTHER; note = 2'-O-Methyl-uridine phosphorothioate
  modified_base 100: mod_base = OTHER; note = 2'-O-Methyl-uridine
  misc_difference 101: note = a, c, g, inosine, u, deoxyadenosine, deoxyguanosine, deoxycytidine, deoxyinosine, thymine, ribonebularine, 2'-O-methylnebularine, or 2'-deoxynebularine
  misc_difference 102: note = a, c, g, inosine, u, deoxyadenosine, deoxyguanosine, deoxycytidine, deoxyinosine, thymine, ribonebularine, 2'-O-methylnebularine, or 2'-deoxynebularine
  misc_difference 103: note = a, c, g, inosine, u, deoxyadenosine, deoxyguanosine, deoxycytidine, deoxyinosine, thymine, ribonebularine, 2'-O-methylnebularine, or 2'-deoxynebularine

SEQ ID NO: 2837 - RNA, 103 nt, synthetic construct; identical to SEQ ID NO: 1795
  source 1..103: mol_type = other RNA
  modified_base 1: mod_base = OTHER; note = 2'-O-Methyl-cytidine phosphorothioate
  modified_base 2: mod_base = OTHER; note = 2'-O-Methyl-cytidine phosphorothioate
  modified_base 3: mod_base = OTHER; note = 2'-O-Methyl-cytidine phosphorothioate
  modified_base 21: mod_base = OTHER; note = 2'-O-Methyl-guanosine
  modified_base 25: mod_base = OTHER; note = uridine phosphorothioate
  modified_base 28: mod_base = OTHER; note = 2'-O-Methyl-adenosine
  modified_base 29: mod_base = OTHER; note = 2'-O-Methyl-guanosine
  modified_base 30: mod_base = OTHER; note = 2'-O-Methyl-cytidine
  modified_base 31: mod_base = OTHER; note = 2'-O-Methyl-uridine
  modified_base 32: mod_base = OTHER; note = 2'-O-Methyl-adenosine
  modified_base 34: mod_base = OTHER; note = 2'-O-Methyl-adenosine
  modified_base 35: mod_base = OTHER; note = 2'-O-Methyl-adenosine
  modified_base 36: mod_base = OTHER; note = 2'-O-Methyl-adenosine
  modified_base 37: mod_base = OTHER; note = 2'-O-Methyl-uridine
  modified_base 38: mod_base = OTHER; note = 2'-O-Methyl-adenosine
  modified_base 39: mod_base = OTHER; note = 2'-O-Methyl-guanosine
  modified_base 40: mod_base = OTHER; note = 2'-O-Methyl-cytidine
  modified_base 41: mod_base = OTHER; note = 2'-O-Methyl-adenosine
  modified_base 42: mod_base = OTHER; note = 2'-O-Methyl-adenosine
  modified_base 45: mod_base = OTHER; note = uridine phosphorothioate
  modified_base 46: mod_base = OTHER; note = 2'-O-Methyl-adenosine
  modified_base 48: mod_base = OTHER; note = 2'-O-Methyl-adenosine
  modified_base 50: mod_base = OTHER; note = 2'-O-Methyl-uridine
  modified_base 52: mod_base = OTHER; note = 2'-O-Methyl-adenosine
  modified_base 53: mod_base = OTHER; note = 2'-O-Methyl-guanosine
  modified_base 54: mod_base = OTHER; note = 2'-O-Methyl-guanosine
  modified_base 55: mod_base = OTHER; note = 2'-O-Methyl-cytidine
  modified_base 56: mod_base = OTHER; note = 2'-O-Methyl-uridine
  modified_base 57: mod_base = OTHER; note = 2'-O-Methyl-adenosine
  modified_base 60: mod_base = OTHER; note = 2'-O-Methyl-cytidine
  modified_base 61: mod_base = OTHER; note = 2'-O-Methyl-cytidine
  modified_base 64: mod_base = OTHER; note = uridine phosphorothioate
  modified_base 66: mod_base = OTHER; note = 2'-O-Methyl-uridine
  modified_base 67: mod_base = OTHER; note = 2'-O-Methyl-cytidine
  modified_base 70: mod_base = OTHER; note = 2'-O-Methyl-cytidine
  modified_base 71: mod_base = OTHER; note = 2'-O-Methyl-uridine
  modified_base 72: mod_base = OTHER; note = 2'-O-Methyl-uridine
  modified_base 74: mod_base = OTHER; note = 2'-O-Methyl-adenosine
  modified_base 75: mod_base = OTHER; note = 2'-O-Methyl-adenosine
  modified_base 76: mod_base = OTHER; note = 2'-O-Methyl-adenosine
  modified_base 77: mod_base = OTHER; note = 2'-O-Methyl-adenosine
  modified_base 78: mod_base = OTHER; note = 2'-O-Methyl-adenosine
  modified_base 79: mod_base = OTHER; note = 2'-O-Methyl-guanosine
  modified_base 80: mod_base = OTHER; note = 2'-O-Methyl-uridine
  modified_base 81: mod_base = OTHER; note = 2'-O-Methyl-guanosine
  modified_base 83: mod_base = OTHER; note = 2'-O-Methyl-cytidine
  modified_base 84: mod_base = OTHER; note = 2'-O-Methyl-adenosine
  modified_base 85: mod_base = OTHER; note = 2'-O-Methyl-cytidine
  modified_base 86: mod_base = OTHER; note = 2'-O-Methyl-cytidine
  modified_base 87: mod_base = OTHER; note = 2'-O-Methyl-guanosine
  modified_base 88: mod_base = OTHER; note = 2'-O-Methyl-adenosine
  modified_base 89: mod_base = OTHER; note = 2'-O-Methyl-guanosine
  modified_base 90: mod_base = OTHER; note = 2'-O-Methyl-uridine
  modified_base 91: mod_base = OTHER; note = 2'-O-Methyl-cytidine
  modified_base 92: mod_base = OTHER; note = 2'-O-Methyl-guanosine
  modified_base 93: mod_base = OTHER; note = 2'-O-Methyl-guanosine
  modified_base 94: mod_base = OTHER; note = 2'-O-Methyl-uridine
  modified_base 95: mod_base = OTHER; note = 2'-O-Methyl-guanosine
  modified_base 96: mod_base = OTHER; note = 2'-O-Methyl-cytidine
  modified_base 97: mod_base = OTHER; note = 2'-O-Methyl-uridine phosphorothioate
  modified_base 98: mod_base = OTHER; note = 2'-O-Methyl-uridine phosphorothioate
  modified_base 99: mod_base = OTHER; note = 2'-O-Methyl-uridine phosphorothioate
  modified_base 100: mod_base = OTHER; note = 2'-O-Methyl-uridine
  misc_difference 101: note = a, c, g, inosine, u, deoxyadenosine, deoxyguanosine, deoxycytidine, deoxyinosine, thymine, ribonebularine, 2'-O-methylnebularine, or 2'-deoxynebularine
  misc_difference 102: note = a, c, g, inosine, u, deoxyadenosine, deoxyguanosine, deoxycytidine, deoxyinosine, thymine, ribonebularine, 2'-O-methylnebularine, or 2'-deoxynebularine
  misc_difference 103: note = a, c, g, inosine, u, deoxyadenosine, deoxyguanosine, deoxycytidine, deoxyinosine, thymine, ribonebularine, 2'-O-methylnebularine, or 2'-deoxynebularine

SEQ ID NO: 2838 - RNA, 103 nt, synthetic construct; identical to SEQ ID NO: 1796
  source 1..103: mol_type = other RNA
  modified_base 1: mod_base = OTHER; note = 2'-O-Methyl-guanosine phosphorothioate
  modified_base 2: mod_base = OTHER; note = 2'-O-Methyl-adenosine phosphorothioate
  modified_base 3: mod_base = OTHER; note = 2'-O-Methyl-guanosine phosphorothioate
  modified_base 21: mod_base = OTHER; note = 2'-O-Methyl-guanosine
  modified_base 25: mod_base = OTHER; note = uridine phosphorothioate
  modified_base 28: mod_base = OTHER; note = 2'-O-Methyl-adenosine
  modified_base 29: mod_base = OTHER; note = 2'-O-Methyl-guanosine
  modified_base 30: mod_base = OTHER; note = 2'-O-Methyl-cytidine
  modified_base 31: mod_base = OTHER; note = 2'-O-Methyl-uridine
  modified_base 32: mod_base = OTHER; note = 2'-O-Methyl-adenosine
  modified_base 33: mod_base = OTHER; note = 2'-O-Methyl-guanosine
  modified_base 34: mod_base = OTHER; note = 2'-O-Methyl-adenosine
  modified_base 35: mod_base = OTHER; note = 2'-O-Methyl-adenosine
  modified_base 36: mod_base = OTHER; note = 2'-O-Methyl-adenosine
  modified_base 37: mod_base = OTHER; note = 2'-O-Methyl-uridine
  modified_base 38: mod_base = OTHER; note = 2'-O-Methyl-adenosine
  modified_base 39: mod_base = OTHER; note = 2'-O-Methyl-guanosine
  modified_base 40: mod_base = OTHER; note = 2'-O-Methyl-cytidine
  modified_base 41: mod_base = OTHER; note = 2'-O-Methyl-adenosine
  modified_base 42: mod_base = OTHER; note = 2'-O-Methyl-adenosine
  modified_base 45: mod_base = OTHER; note = uridine phosphorothioate
  modified_base 46: mod_base = OTHER; note = 2'-O-Methyl-adenosine
  modified_base 48: mod_base = OTHER; note = 2'-O-Methyl-adenosine
  modified_base 50: mod_base = OTHER; note = 2'-O-Methyl-uridine
  modified_base 52: mod_base = OTHER; note = 2'-O-Methyl-adenosine
  modified_base 53: mod_base = OTHER; note = 2'-O-Methyl-guanosine
  modified_base 54: mod_base = OTHER; note = 2'-O-Methyl-guanosine
  modified_base 55: mod_base = OTHER; note = 2'-O-Methyl-cytidine
  modified_base 56: mod_base = OTHER; note = 2'-O-Methyl-uridine
  modified_base 57: mod_base = OTHER; note = 2'-O-Methyl-adenosine
  modified_base 60: mod_base = OTHER; note = 2'-O-Methyl-cytidine
  modified_base 61: mod_base = OTHER; note = 2'-O-Methyl-cytidine
  modified_base 64: mod_base = OTHER; note = uridine phosphorothioate
  modified_base 66: mod_base = OTHER; note = 2'-O-Methyl-uridine
  modified_base 67: mod_base = OTHER; note = 2'-O-Methyl-cytidine
  modified_base 70: mod_base = OTHER; note = 2'-O-Methyl-cytidine
  modified_base 71: mod_base = OTHER; note = 2'-O-Methyl-uridine
  modified_base 72: mod_base = OTHER; note = 2'-O-Methyl-uridine
  modified_base 73: mod_base = OTHER; note = 2'-O-Methyl-guanosine
  modified_base 74: mod_base = OTHER; note = 2'-O-Methyl-adenosine
  modified_base 75: mod_base = OTHER; note = 2'-O-Methyl-adenosine
  modified_base 76: mod_base = OTHER; note = 2'-O-Methyl-adenosine
  modified_base 77: mod_base = OTHER; note = 2'-O-Methyl-adenosine
  modified_base 78: mod_base = OTHER; note = 2'-O-Methyl-adenosine
  modified_base 79: mod_base = OTHER; note = 2'-O-Methyl-guanosine
  modified_base 80: mod_base = OTHER; note = 2'-O-Methyl-uridine
  modified_base 81: mod_base = OTHER; note = 2'-O-Methyl-guanosine
  modified_base 83: mod_base = OTHER; note = 2'-O-Methyl-cytidine
  modified_base 84: mod_base = OTHER; note = 2'-O-Methyl-adenosine
  modified_base 85: mod_base = OTHER; note = 2'-O-Methyl-cytidine
  modified_base 86: mod_base = OTHER; note = 2'-O-Methyl-cytidine
  modified_base 87: mod_base = OTHER; note = 2'-O-Methyl-guanosine
  modified_base 88: mod_base = OTHER; note = 2'-O-Methyl-adenosine
  modified_base 89: mod_base = OTHER; note = 2'-O-Methyl-guanosine
  modified_base 90: mod_base = OTHER; note = 2'-O-Methyl-uridine
  modified_base 91: mod_base = OTHER; note = 2'-O-Methyl-cytidine
  modified_base 92: mod_base = OTHER; note = 2'-O-Methyl-guanosine
  modified_base 93: mod_base = OTHER; note = 2'-O-Methyl-guanosine
  modified_base 94: mod_base = OTHER; note = 2'-O-Methyl-uridine
  modified_base 95: mod_base = OTHER; note = 2'-O-Methyl-guanosine
  modified_base 96: mod_base = OTHER; note = 2'-O-Methyl-cytidine
  modified_base 97: mod_base = OTHER; note = 2'-O-Methyl-uridine phosphorothioate
  modified_base 98: mod_base = OTHER; note = 2'-O-Methyl-uridine phosphorothioate
  modified_base 99: mod_base = OTHER; note = 2'-O-Methyl-uridine phosphorothioate
  modified_base 100: mod_base = OTHER; note = 2'-O-Methyl-uridine
  misc_difference 101: note = a, c, g, inosine, u, deoxyadenosine, deoxyguanosine, deoxycytidine, deoxyinosine, thymine, ribonebularine, 2'-O-methylnebularine, or 2'-deoxynebularine
  misc_difference 102: note = a, c, g, inosine, u, deoxyadenosine, deoxyguanosine, deoxycytidine, deoxyinosine, thymine, ribonebularine, 2'-O-methylnebularine, or 2'-deoxynebularine
  misc_difference 103: note = a, c, g, inosine, u, deoxyadenosine, deoxyguanosine, deoxycytidine, deoxyinosine, thymine, ribonebularine, 2'-O-methylnebularine, or 2'-deoxynebularine

SEQ ID NO: 2839 - RNA, 103 nt, synthetic construct; identical to SEQ ID NO: 1796
  source 1..103: mol_type = other RNA
  modified_base 1: mod_base = OTHER; note = 2'-O-Methyl-guanosine phosphorothioate
  modified_base 2: mod_base = OTHER; note = 2'-O-Methyl-adenosine phosphorothioate
  modified_base 3: mod_base = OTHER; note = 2'-O-Methyl-guanosine phosphorothioate
  modified_base 21: mod_base = OTHER; note = 2'-O-Methyl-guanosine
  modified_base 25: mod_base = OTHER; note = uridine phosphorothioate
  modified_base 28: mod_base = OTHER; note = 2'-O-Methyl-adenosine
  modified_base 29: mod_base = OTHER; note = 2'-O-Methyl-guanosine
  modified_base 30: mod_base = OTHER; note = 2'-O-Methyl-cytidine
  modified_base 31: mod_base = OTHER; note = 2'-O-Methyl-uridine
  modified_base 32: mod_base = OTHER; note = 2'-O-Methyl-adenosine
  modified_base 34: mod_base = OTHER; note = 2'-O-Methyl-adenosine
  modified_base 35: mod_base = OTHER; note = 2'-O-Methyl-adenosine
  modified_base 36: mod_base = OTHER; note = 2'-O-Methyl-adenosine
  modified_base 37: mod_base = OTHER; note = 2'-O-Methyl-uridine
  modified_base 38: mod_base = OTHER; note = 2'-O-Methyl-adenosine
  modified_base 39: mod_base = OTHER; note = 2'-O-Methyl-guanosine
  modified_base 40: mod_base = OTHER; note = 2'-O-Methyl-cytidine
  modified_base 41: mod_base = OTHER; note = 2'-O-Methyl-adenosine
  modified_base 42: mod_base = OTHER; note = 2'-O-Methyl-adenosine
  modified_base 45: mod_base = OTHER; note = uridine phosphorothioate
  modified_base 46: mod_base = OTHER; note = 2'-O-Methyl-adenosine
  modified_base 48: mod_base = OTHER; note = 2'-O-Methyl-adenosine
  modified_base 50: mod_base = OTHER; note = 2'-O-Methyl-uridine
  modified_base 52: mod_base = OTHER; note = 2'-O-Methyl-adenosine
  modified_base 53: mod_base = OTHER; note = 2'-O-Methyl-guanosine
  modified_base 54: mod_base = OTHER; note = 2'-O-Methyl-guanosine
  modified_base 55: mod_base = OTHER; note = 2'-O-Methyl-cytidine
  modified_base 56: mod_base = OTHER; note = 2'-O-Methyl-uridine
  modified_base 57: mod_base = OTHER; note = 2'-O-Methyl-adenosine
  modified_base 60: mod_base = OTHER; note = 2'-O-Methyl-cytidine
  modified_base 61: mod_base = OTHER; note = 2'-O-Methyl-cytidine
  modified_base 64: mod_base = OTHER; note = uridine phosphorothioate
  modified_base 66: mod_base = OTHER; note = 2'-O-Methyl-uridine
  modified_base 67: mod_base = OTHER; note = 2'-O-Methyl-cytidine
  modified_base 70: mod_base = OTHER; note = 2'-O-Methyl-cytidine
  modified_base 71: mod_base = OTHER; note = 2'-O-Methyl-uridine
  modified_base 72: mod_base = OTHER; note = 2'-O-Methyl-uridine
  modified_base 74: mod_base = OTHER; note = 2'-O-Methyl-adenosine
  modified_base 75: mod_base = OTHER; note = 2'-O-Methyl-adenosine
  modified_base 76: mod_base = OTHER; note = 2'-O-Methyl-adenosine
  modified_base 77: mod_base = OTHER; note = 2'-O-Methyl-adenosine
  modified_base 78: mod_base = OTHER; note = 2'-O-Methyl-adenosine
  modified_base 79: mod_base = OTHER; note = 2'-O-Methyl-guanosine
  modified_base 80: mod_base = OTHER; note = 2'-O-Methyl-uridine
  modified_base 81: mod_base = OTHER; note = 2'-O-Methyl-guanosine
  modified_base 83: mod_base = OTHER; note = 2'-O-Methyl-cytidine
  modified_base 84: mod_base = OTHER; note = 2'-O-Methyl-adenosine
  modified_base 85: mod_base = OTHER; note = 2'-O-Methyl-cytidine
  modified_base 86: mod_base = OTHER; note = 2'-O-Methyl-cytidine
  modified_base 87: mod_base = OTHER; note = 2'-O-Methyl-guanosine
  modified_base 88: mod_base = OTHER; note = 2'-O-Methyl-adenosine
  modified_base 89: mod_base = OTHER; note = 2'-O-Methyl-guanosine
  modified_base 90: mod_base = OTHER; note = 2'-O-Methyl-uridine
  modified_base 91: mod_base = OTHER; note = 2'-O-Methyl-cytidine
  modified_base 92: mod_base = OTHER; note = 2'-O-Methyl-guanosine
  modified_base 93: mod_base = OTHER; note = 2'-O-Methyl-guanosine
  modified_base 94: mod_base = OTHER; note = 2'-O-Methyl-uridine
  modified_base 95: mod_base = OTHER; note = 2'-O-Methyl-guanosine
  modified_base 96: mod_base = OTHER; note = 2'-O-Methyl-cytidine
  modified_base 97: mod_base = OTHER; note = 2'-O-Methyl-uridine phosphorothioate
  modified_base 98: mod_base = OTHER; note = 2'-O-Methyl-uridine phosphorothioate
  modified_base 99: mod_base = OTHER; note = 2'-O-Methyl-uridine phosphorothioate
  modified_base 100: mod_base = OTHER; note = 2'-O-Methyl-uridine
  misc_difference 101: note = a, c, g, inosine, u, deoxyadenosine, deoxyguanosine, deoxycytidine, deoxyinosine, thymine, ribonebularine, 2'-O-methylnebularine, or 2'-deoxynebularine
  misc_difference 102: note = a, c, g, inosine, u, deoxyadenosine, deoxyguanosine, deoxycytidine, deoxyinosine, thymine, ribonebularine, 2'-O-methylnebularine, or 2'-deoxynebularine
  misc_difference 103: note = a, c, g, inosine, u, deoxyadenosine, deoxyguanosine, deoxycytidine, deoxyinosine, thymine, ribonebularine, 2'-O-methylnebularine, or 2'-deoxynebularine

SEQ ID NO: 2840 - RNA, 103 nt, synthetic construct; identical to SEQ ID NO: 1797
  source 1..103: mol_type = other RNA
  modified_base 1: mod_base = OTHER; note = 2'-O-Methyl-cytidine phosphorothioate
  modified_base 2: mod_base = OTHER; note = 2'-O-Methyl-adenosine phosphorothioate
  modified_base 3: mod_base = OTHER; note = 2'-O-Methyl-guanosine phosphorothioate
  modified_base 21: mod_base = OTHER; note = 2'-O-Methyl-guanosine
  modified_base 25: mod_base = OTHER; note = uridine phosphorothioate
  modified_base 28: mod_base = OTHER; note = 2'-O-Methyl-adenosine
  modified_base 29: mod_base = OTHER; note = 2'-O-Methyl-guanosine
  modified_base 30: mod_base = OTHER; note = 2'-O-Methyl-cytidine
  modified_base 31: mod_base = OTHER; note = 2'-O-Methyl-uridine
  modified_base 32: mod_base = OTHER; note = 2'-O-Methyl-adenosine
  modified_base 33: mod_base = OTHER; note = 2'-O-Methyl-guanosine
  modified_base 34: mod_base = OTHER; note = 2'-O-Methyl-adenosine
  modified_base 35: mod_base = OTHER; note = 2'-O-Methyl-adenosine
  modified_base 36: mod_base = OTHER; note = 2'-O-Methyl-adenosine
  modified_base 37: mod_base = OTHER; note = 2'-O-Methyl-uridine
  modified_base 38: mod_base = OTHER; note = 2'-O-Methyl-adenosine
  modified_base 39: mod_base = OTHER; note = 2'-O-Methyl-guanosine
  modified_base 40: mod_base = OTHER; note = 2'-O-Methyl-cytidine
  modified_base 41: mod_base = OTHER; note = 2'-O-Methyl-adenosine
  modified_base 42: mod_base = OTHER; note = 2'-O-Methyl-adenosine
  modified_base 45: mod_base = OTHER; note = uridine phosphorothioate
  modified_base 46: mod_base = OTHER; note = 2'-O-Methyl-adenosine
  modified_base 48: mod_base = OTHER; note = 2'-O-Methyl-adenosine
  modified_base 50: mod_base = OTHER; note = 2'-O-Methyl-uridine
  modified_base 52: mod_base = OTHER; note = 2'-O-Methyl-adenosine
  modified_base 53: mod_base = OTHER; note = 2'-O-Methyl-guanosine
  modified_base 54: mod_base = OTHER; note = 2'-O-Methyl-guanosine
  modified_base 57: mod_base = OTHER; note = 2'-O-Methyl-adenosine
  modified_base 61: mod_base = OTHER; note = 2'-O-Methyl-cytidine
  modified_base 64: mod_base = OTHER; note = uridine phosphorothioate
  modified_base 66: mod_base = OTHER; note = 2'-O-Methyl-uridine
  modified_base 67: mod_base = OTHER; note = 2'-O-Methyl-cytidine
  modified_base 70: mod_base = OTHER; note = 2'-O-Methyl-cytidine
  modified_base 71: mod_base = OTHER; note = 2'-O-Methyl-uridine
  modified_base 72: mod_base = OTHER; note = 2'-O-Methyl-uridine
  modified_base 74: mod_base = OTHER; note = 2'-O-Methyl-adenosine
  modified_base 75: mod_base = OTHER; note = 2'-O-Methyl-adenosine
  modified_base 76: mod_base = OTHER; note = 2'-O-Methyl-adenosine
  modified_base 77: mod_base = OTHER; note = 2'-O-Methyl-adenosine
  modified_base 78: mod_base = OTHER; note = 2'-O-Methyl-adenosine
  modified_base 79: mod_base = OTHER; note = 2'-O-Methyl-guanosine
  modified_base 80: mod_base = OTHER; note = 2'-O-Methyl-uridine
  modified_base 82: mod_base = OTHER; note = 2'-O-Methyl-guanosine
  modified_base 83: mod_base = OTHER; note = 2'-O-Methyl-cytidine
  modified_base 84: mod_base = OTHER; note = 2'-O-Methyl-adenosine
  modified_base 85: mod_base = OTHER; note = 2'-O-Methyl-cytidine
  modified_base 86: mod_base = OTHER; note = 2'-O-Methyl-cytidine
  modified_base 87: mod_base = OTHER; note = 2'-O-Methyl-guanosine
  modified_base 89: mod_base = OTHER; note = 2'-O-Methyl-guanosine
  modified_base 92: mod_base = OTHER; note = 2'-O-Methyl-guanosine
  modified_base 93: mod_base = OTHER; note = 2'-O-Methyl-guanosine
  modified_base 94: mod_base = OTHER; note = 2'-O-Methyl-uridine
  modified_base 95: mod_base = OTHER; note = 2'-O-Methyl-guanosine
  modified_base 96: mod_base = OTHER; note = 2'-O-Methyl-cytidine
  modified_base 97: mod_base = OTHER; note = 2'-O-Methyl-uridine phosphorothioate
  modified_base 98: mod_base = OTHER; note = 2'-O-Methyl-uridine phosphorothioate
  modified_base 99: mod_base = OTHER; note = 2'-O-Methyl-uridine phosphorothioate
  modified_base 100: mod_base = OTHER; note = 2'-O-Methyl-uridine
  misc_difference 101: note = a, c, g, inosine, u, deoxyadenosine, deoxyguanosine, deoxycytidine, deoxyinosine, thymine, ribonebularine, 2'-O-methylnebularine, or 2'-deoxynebularine
  misc_difference 102: note = a, c, g, inosine, u, deoxyadenosine, deoxyguanosine, deoxycytidine, deoxyinosine, thymine, ribonebularine, 2'-O-methylnebularine, or 2'-deoxynebularine
  misc_difference 103: note = a, c, g, inosine, u, deoxyadenosine, deoxyguanosine, deoxycytidine, deoxyinosine, thymine, ribonebularine, 2'-O-methylnebularine, or 2'-deoxynebularine

SEQ ID NO: 2841 - RNA, 103 nt, synthetic construct; identical to SEQ ID NO: 1797
  source 1..103: mol_type = other RNA
  modified_base 1: mod_base = OTHER; note = 2'-O-Methyl-cytidine phosphorothioate
  modified_base 2: mod_base = OTHER; note = 2'-O-Methyl-adenosine phosphorothioate
  modified_base 3: mod_base = OTHER; note = 2'-O-Methyl-guanosine phosphorothioate
  modified_base 21: mod_base = OTHER; note = 2'-O-Methyl-guanosine
  modified_base 25: mod_base = OTHER; note = uridine phosphorothioate
  modified_base 28: mod_base = OTHER; note = 2'-O-Methyl-adenosine
  modified_base 29: mod_base = OTHER; note = 2'-O-Methyl-guanosine
  modified_base 30: mod_base = OTHER; note = 2'-O-Methyl-cytidine
  modified_base 31: mod_base = OTHER; note = 2'-O-Methyl-uridine
  modified_base 32: mod_base = OTHER; note = 2'-O-Methyl-adenosine
  modified_base 33: mod_base = OTHER; note = 2'-O-Methyl-guanosine
  modified_base 34: mod_base = OTHER; note = 2'-O-Methyl-adenosine
  modified_base 35: mod_base = OTHER; note = 2'-O-Methyl-adenosine
  modified_base 36: mod_base = OTHER; note = 2'-O-Methyl-adenosine
  modified_base 37: mod_base = OTHER; note = 2'-O-Methyl-uridine
  modified_base 38: mod_base = OTHER; note = 2'-O-Methyl-adenosine
  modified_base 39: mod_base = OTHER; note = 2'-O-Methyl-guanosine
  modified_base 40: mod_base = OTHER; note = 2'-O-Methyl-cytidine
  modified_base 41: mod_base = OTHER; note = 2'-O-Methyl-adenosine
  modified_base 42: mod_base = OTHER; note = 2'-O-Methyl-adenosine
  modified_base 45: mod_base = OTHER; note = uridine phosphorothioate
  modified_base 46: mod_base = OTHER; note = 2'-O-Methyl-adenosine
  modified_base 48: mod_base = OTHER; note = 2'-O-Methyl-adenosine
  modified_base 50: mod_base = OTHER; note = 2'-O-Methyl-uridine
  modified_base 52: mod_base = OTHER; note = 2'-O-Methyl-adenosine
  modified_base 53: mod_base = OTHER; note = 2'-O-Methyl-guanosine
  modified_base 54: mod_base = OTHER; note = 2'-O-Methyl-guanosine
  modified_base 55: mod_base = OTHER; note = 2'-O-Methyl-cytidine
  modified_base 56: mod_base = OTHER; note = 2'-O-Methyl-uridine
  modified_base 57: mod_base = OTHER; note = 2'-O-Methyl-adenosine
  modified_base 60: mod_base = OTHER; note = 2'-O-Methyl-cytidine
  modified_base 61: mod_base = OTHER; note = 2'-O-Methyl-cytidine
  modified_base 64: mod_base = OTHER; note = uridine phosphorothioate
  modified_base 66: mod_base = OTHER; note = 2'-O-Methyl-uridine
  modified_base 67: mod_base = OTHER; note = 2'-O-Methyl-cytidine
  modified_base 70: mod_base = OTHER; note = 2'-O-Methyl-cytidine
  modified_base 71: mod_base = OTHER; note = 2'-O-Methyl-uridine
  modified_base 72: mod_base = OTHER; note = 2'-O-Methyl-uridine
  modified_base 74: mod_base = OTHER; note = 2'-O-Methyl-adenosine
  modified_base 75: mod_base = OTHER; note = 2'-O-Methyl-adenosine
  modified_base 76: mod_base = OTHER; note = 2'-O-Methyl-adenosine
  modified_base 77: mod_base = OTHER; note = 2'-O-Methyl-adenosine
  modified_base 78: mod_base = OTHER; note = 2'-O-Methyl-adenosine
  modified_base 79: mod_base = OTHER; note = 2'-O-Methyl-guanosine
  modified_base 80: mod_base = OTHER; note = 2'-O-Methyl-uridine
  modified_base 82: mod_base = OTHER; note = 2'-O-Methyl-guanosine
  modified_base 83: mod_base = OTHER; note = 2'-O-Methyl-cytidine
  modified_base 84: mod_base = OTHER; note = 2'-O-Methyl-adenosine
  modified_base 85: mod_base = OTHER; note = 2'-O-Methyl-cytidine
  modified_base 86: mod_base = OTHER; note = 2'-O-Methyl-cytidine
  modified_base 87: mod_base = OTHER; note = 2'-O-Methyl-guanosine
  modified_base 89: mod_base = OTHER; note = 2'-O-Methyl-guanosine
  modified_base 92: mod_base = OTHER; note = 2'-O-Methyl-guanosine
  modified_base 93: mod_base = OTHER; note = 2'-O-Methyl-guanosine
  modified_base 94: mod_base = OTHER; note = 2'-O-Methyl-uridine
  modified_base 95: mod_base = OTHER; note = 2'-O-Methyl-guanosine
  modified_base 96: mod_base = OTHER; note = 2'-O-Methyl-cytidine
  modified_base 97: mod_base = OTHER; note = 2'-O-Methyl-uridine phosphorothioate
  modified_base 98: mod_base = OTHER; note = 2'-O-Methyl-uridine phosphorothioate
  modified_base 99: mod_base = OTHER; note = 2'-O-Methyl-uridine phosphorothioate
  modified_base 100: mod_base = OTHER; note = 2'-O-Methyl-uridine
  misc_difference 101: note = a, c, g, inosine, u, deoxyadenosine, deoxyguanosine, deoxycytidine, deoxyinosine, thymine, ribonebularine, 2'-O-methylnebularine, or 2'-deoxynebularine
  misc_difference 102: note = a, c, g, inosine, u, deoxyadenosine, deoxyguanosine, deoxycytidine, deoxyinosine, thymine, ribonebularine, 2'-O-methylnebularine, or 2'-deoxynebularine
  misc_difference 103: note = a, c, g, inosine, u, deoxyadenosine, deoxyguanosine, deoxycytidine, deoxyinosine, thymine, ribonebularine, 2'-O-methylnebularine, or 2'-deoxynebularine

SEQ ID NO: 2842 - RNA, 103 nt, synthetic construct; identical to SEQ ID NO: 1797
  source 1..103: mol_type = other RNA
  modified_base 1: mod_base = OTHER; note = 2'-O-Methyl-cytidine phosphorothioate
  modified_base 2: mod_base = OTHER; note = 2'-O-Methyl-adenosine phosphorothioate
  modified_base 3: mod_base = OTHER; note = 2'-O-Methyl-guanosine phosphorothioate
  modified_base 21: mod_base = OTHER; note = 2'-O-Methyl-guanosine
  modified_base 25: mod_base = OTHER; note = uridine phosphorothioate
  modified_base 28: mod_base = OTHER; note = 2'-O-Methyl-adenosine
  modified_base 29: mod_base = OTHER; note = 2'-O-Methyl-guanosine
  modified_base 30: mod_base = OTHER; note = 2'-O-Methyl-cytidine
  modified_base 31: mod_base = OTHER; note = 2'-O-Methyl-uridine
  modified_base 32: mod_base = OTHER; note = 2'-O-Methyl-adenosine
  modified_base 33: mod_base = OTHER; note = 2'-O-Methyl-guanosine
  modified_base 34: mod_base = OTHER; note = 2'-O-Methyl-adenosine
  modified_base 35: mod_base = OTHER; note = 2'-O-Methyl-adenosine
  modified_base 36: mod_base = OTHER; note = 2'-O-Methyl-adenosine
  modified_base 37: mod_base = OTHER; note = 2'-O-Methyl-uridine
  modified_base 38: mod_base = OTHER; note = 2'-O-Methyl-adenosine
  modified_base 39: mod_base = OTHER; note = 2'-O-Methyl-guanosine
  modified_base 40: mod_base = OTHER; note = 2'-O-Methyl-cytidine
  modified_base 41: mod_base = OTHER; note = 2'-O-Methyl-adenosine
  modified_base 42: mod_base = OTHER; note = 2'-O-Methyl-adenosine
  modified_base 45: mod_base = OTHER; note = uridine phosphorothioate
  modified_base 46: mod_base = OTHER; note = 2'-O-Methyl-adenosine
  modified_base 48: mod_base = OTHER; note = 2'-O-Methyl-adenosine
  modified_base 50: mod_base = OTHER; note = 2'-O-Methyl-uridine
  modified_base 52: mod_base = OTHER; note = 2'-O-Methyl-adenosine
  modified_base 53: mod_base = OTHER; note = 2'-O-Methyl-guanosine
  modified_base 54: mod_base = OTHER; note = 2'-O-Methyl-guanosine
  modified_base 57: mod_base = OTHER; note = 2'-O-Methyl-adenosine
  modified_base 61: mod_base = OTHER; note = 2'-O-Methyl-cytidine
  modified_base 64: mod_base = OTHER; note = uridine phosphorothioate
  modified_base 66: mod_base = OTHER; note = 2'-O-Methyl-uridine
  modified_base 67: mod_base = OTHER; note = 2'-O-Methyl-cytidine
  modified_base 70: mod_base = OTHER; note = 2'-O-Methyl-cytidine
  modified_base 71: mod_base = OTHER; note = 2'-O-Methyl-uridine
  modified_base 72: mod_base = OTHER; note = 2'-O-Methyl-uridine
  modified_base 73: mod_base = OTHER; note = 2'-O-Methyl-guanosine
  modified_base 74: mod_base = OTHER; note = 2'-O-Methyl-adenosine
  modified_base 75: mod_base = OTHER; note = 2'-O-Methyl-adenosine
  modified_base 76: mod_base = OTHER; note = 2'-O-Methyl-adenosine
  modified_base 77: mod_base = OTHER; note = 2'-O-Methyl-adenosine
  modified_base 78: mod_base = OTHER; note = 2'-O-Methyl-adenosine
  modified_base 79: mod_base = OTHER; note = 2'-O-Methyl-guanosine
  modified_base 80: mod_base = OTHER; note = 2'-O-Methyl-uridine
  modified_base 82: mod_base = OTHER; note = 2'-O-Methyl-guanosine
  modified_base 83: mod_base = OTHER; note = 2'-O-Methyl-cytidine
  modified_base 84: mod_base = OTHER; note = 2'-O-Methyl-adenosine
  modified_base 85: mod_base = OTHER; note = 2'-O-Methyl-cytidine
  modified_base 86: mod_base = OTHER; note = 2'-O-Methyl-cytidine
  modified_base 87: mod_base = OTHER; note = 2'-O-Methyl-guanosine
  modified_base 89: mod_base = OTHER; note = 2'-O-Methyl-guanosine
  modified_base 92: mod_base = OTHER; note = 2'-O-Methyl-guanosine
  modified_base 93: mod_base = OTHER; note = 2'-O-Methyl-guanosine
  modified_base 94: mod_base = OTHER; note = 2'-O-Methyl-uridine
  modified_base 95: mod_base = OTHER; note = 2'-O-Methyl-guanosine
  modified_base 96: mod_base = OTHER; note = 2'-O-Methyl-cytidine
  modified_base 97: mod_base = OTHER; note = 2'-O-Methyl-uridine phosphorothioate
  modified_base 98: mod_base = OTHER; note = 2'-O-Methyl-uridine phosphorothioate
  modified_base 99: mod_base = OTHER; note = 2'-O-Methyl-uridine phosphorothioate
  modified_base 100: mod_base = OTHER; note = 2'-O-Methyl-uridine
  misc_difference 101: note = a, c, g, inosine, u, deoxyadenosine, deoxyguanosine, deoxycytidine, deoxyinosine, thymine, ribonebularine, 2'-O-methylnebularine, or 2'-deoxynebularine
  misc_difference 102: note = a, c, g, inosine, u, deoxyadenosine, deoxyguanosine, deoxycytidine, deoxyinosine, thymine, ribonebularine, 2'-O-methylnebularine, or 2'-deoxynebularine
  misc_difference 103: note = a, c, g, inosine, u, deoxyadenosine, deoxyguanosine, deoxycytidine, deoxyinosine, thymine, ribonebularine, 2'-O-methylnebularine, or 2'-deoxynebularine

SEQ ID NO: 2843 - RNA, 103 nt, synthetic construct; identical to SEQ ID NO: 1797
  source 1..103: mol_type = other RNA
  modified_base 1: mod_base = OTHER; note = 2'-O-Methyl-cytidine phosphorothioate
  modified_base 2: mod_base = OTHER; note = 2'-O-Methyl-adenosine phosphorothioate
  modified_base 3: mod_base = OTHER; note = 2'-O-Methyl-guanosine phosphorothioate
  modified_base 21: mod_base = OTHER; note = 2'-O-Methyl-guanosine
  modified_base 25: mod_base = OTHER; note = uridine phosphorothioate
  modified_base 28: mod_base = OTHER; note = 2'-O-Methyl-adenosine
  modified_base 29: mod_base = OTHER; note = 2'-O-Methyl-guanosine
  modified_base 30: mod_base = OTHER; note = 2'-O-Methyl-cytidine
  modified_base 31: mod_base = OTHER; note = 2'-O-Methyl-uridine
  modified_base 32: mod_base = OTHER; note = 2'-O-Methyl-adenosine
  modified_base 33: mod_base = OTHER; note = 2'-O-Methyl-guanosine
  modified_base 34: mod_base = OTHER; note = 2'-O-Methyl-adenosine
  modified_base 35: mod_base = OTHER; note = 2'-O-Methyl-adenosine
  modified_base 36: mod_base = OTHER; note = 2'-O-Methyl-adenosine
  modified_base 37: mod_base = OTHER; note = 2'-O-Methyl-uridine
  modified_base 38: mod_base = OTHER; note = 2'-O-Methyl-adenosine
  modified_base 39: mod_base = OTHER; note = 2'-O-Methyl-guanosine
  modified_base 40: mod_base = OTHER; note = 2'-O-Methyl-cytidine
  modified_base 41: mod_base = OTHER; note = 2'-O-Methyl-adenosine
  modified_base 42: mod_base = OTHER; note = 2'-O-Methyl-adenosine
  modified_base 45: mod_base = OTHER; note = uridine phosphorothioate
  modified_base 46: mod_base = OTHER; note = 2'-O-Methyl-adenosine
  modified_base 48: mod_base = OTHER; note = 2'-O-Methyl-adenosine
  modified_base 50: mod_base = OTHER; note = 2'-O-Methyl-uridine
  modified_base 52: mod_base = OTHER; note = 2'-O-Methyl-adenosine
  modified_base 53: mod_base = OTHER; note = 2'-O-Methyl-guanosine
  modified_base 54: mod_base = OTHER; note = 2'-O-Methyl-guanosine
  modified_base 57: mod_base = OTHER; note = 2'-O-Methyl-adenosine
  modified_base 61: mod_base = OTHER; note = 2'-O-Methyl-cytidine
  modified_base 64: mod_base = OTHER; note = uridine phosphorothioate
  modified_base 66: mod_base = OTHER; note = 2'-O-Methyl-uridine
  modified_base 67: mod_base = OTHER; note = 2'-O-Methyl-cytidine
  modified_base 70: mod_base = OTHER; note = 2'-O-Methyl-cytidine
  modified_base 71: mod_base = OTHER; note = 2'-O-Methyl-uridine
  modified_base 72: mod_base = OTHER; note = 2'-O-Methyl-uridine
  modified_base 73: mod_base = OTHER; note = 2'-O-Methyl-guanosine
  modified_base 74: mod_base = OTHER; note = 2'-O-Methyl-adenosine
  modified_base 75: mod_base = OTHER; note = 2'-O-Methyl-adenosine
  modified_base 76: mod_base = OTHER; note = 2'-O-Methyl-adenosine
  modified_base 77: mod_base = OTHER; note = 2'-O-Methyl-adenosine
  modified_base 78: mod_base = OTHER; note = 2'-O-Methyl-adenosine
  modified_base 79: mod_base = OTHER; note = 2'-O-Methyl-guanosine
  modified_base 80: mod_base = OTHER; note = 2'-O-Methyl-uridine
  modified_base 82: mod_base = OTHER; note = 2'-O-Methyl-guanosine
  modified_base 83: mod_base = OTHER; note = 2'-O-Methyl-cytidine
  modified_base 84: mod_base = OTHER; note = 2'-O-Methyl-adenosine
  modified_base 85: mod_base = OTHER; note = 2'-O-Methyl-cytidine
  modified_base 86: mod_base = OTHER; note = 2'-O-Methyl-cytidine
  modified_base 87: mod_base = OTHER; note = 2'-O-Methyl-guanosine
  modified_base 89: mod_base = OTHER; note = 2'-O-Methyl-guanosine
  modified_base 91: mod_base = OTHER; note = 2'-O-Methyl-cytidine
  modified_base 92: mod_base = OTHER; note = 2'-O-Methyl-guanosine
  modified_base 93: mod_base = OTHER; note = 2'-O-Methyl-guanosine
  modified_base 94: mod_base = OTHER; note = 2'-O-Methyl-uridine
  modified_base 95: mod_base = OTHER; note = 2'-O-Methyl-guanosine
  modified_base 96: mod_base = OTHER; note = 2'-O-Methyl-cytidine
  modified_base 97: mod_base = OTHER; note = 2'-O-Methyl-uridine phosphorothioate
  modified_base 98: mod_base = OTHER; note = 2'-O-Methyl-uridine phosphorothioate
  modified_base 99: mod_base = OTHER; note = 2'-O-Methyl-uridine phosphorothioate
  modified_base 100: mod_base = OTHER; note = 2'-O-Methyl-uridine
  misc_difference 101: note = a, c, g, inosine, u, deoxyadenosine, deoxyguanosine, deoxycytidine, deoxyinosine, thymine, ribonebularine, 2'-O-methylnebularine, or 2'-deoxynebularine
  misc_difference 102: note = a, c, g, inosine, u, deoxyadenosine, deoxyguanosine, deoxycytidine, deoxyinosine, thymine, ribonebularine, 2'-O-methylnebularine, or 2'-deoxynebularine
  misc_difference 103: note = a, c, g, inosine, u, deoxyadenosine, deoxyguanosine, deoxycytidine, deoxyinosine, thymine, ribonebularine, 2'-O-methylnebularine, or 2'-deoxynebularine

SEQ ID NO: 2844 - RNA, 103 nt, synthetic construct; identical to SEQ ID NO: 1797
  source 1..103: mol_type = other RNA
  modified_base 1: mod_base = OTHER; note = 2'-O-Methyl-cytidine phosphorothioate
  modified_base 2: mod_base = OTHER; note = 2'-O-Methyl-adenosine phosphorothioate
  modified_base 3: mod_base = OTHER; note = 2'-O-Methyl-guanosine phosphorothioate
  modified_base 21: mod_base = OTHER; note = 2'-O-Methyl-guanosine
  modified_base 25: mod_base = OTHER; note = uridine phosphorothioate
  modified_base 28: mod_base = OTHER; note = 2'-O-Methyl-adenosine
  modified_base 29: mod_base = OTHER; note = 2'-O-Methyl-guanosine
  modified_base 30: mod_base = OTHER; note = 2'-O-Methyl-cytidine
  modified_base 31: mod_base = OTHER; note = 2'-O-Methyl-uridine
  modified_base 32: mod_base = OTHER; note = 2'-O-Methyl-adenosine
  modified_base 34: mod_base = OTHER; note = 2'-O-Methyl-adenosine
  modified_base 35: mod_base = OTHER; note = 2'-O-Methyl-adenosine
  modified_base 36: mod_base = OTHER; note = 2'-O-Methyl-adenosine
  modified_base 37: mod_base = OTHER; note = 2'-O-Methyl-uridine
  modified_base 38: mod_base = OTHER; note = 2'-O-Methyl-adenosine
  modified_base 39: mod_base = OTHER; note = 2'-O-Methyl-guanosine
  modified_base 40: mod_base = OTHER; note = 2'-O-Methyl-cytidine
  modified_base 41: mod_base = OTHER; note = 2'-O-Methyl-adenosine
  modified_base 42: mod_base = OTHER; note = 2'-O-Methyl-adenosine
  modified_base 45: mod_base = OTHER; note = uridine phosphorothioate
  modified_base 46: mod_base = OTHER; note = 2'-O-Methyl-adenosine
  modified_base 48: mod_base = OTHER; note = 2'-O-Methyl-adenosine
  modified_base 50: mod_base = OTHER; note = 2'-O-Methyl-uridine
  modified_base 52: mod_base = OTHER; note = 2'-O-Methyl-adenosine
  modified_base 53: mod_base = OTHER; note = 2'-O-Methyl-guanosine
  modified_base 54: mod_base = OTHER; note = 2'-O-Methyl-guanosine
  modified_base 57: mod_base = OTHER; note = 2'-O-Methyl-adenosine
  modified_base 61: mod_base = OTHER; note = 2'-O-Methyl-cytidine
  modified_base 64: mod_base = OTHER; note = uridine phosphorothioate
  modified_base 66: mod_base = OTHER; note = 2'-O-Methyl-uridine
  modified_base 67: mod_base = OTHER; note = 2'-O-Methyl-cytidine
  modified_base 70: mod_base = OTHER; note = 2'-O-Methyl-cytidine
  modified_base 71: mod_base = OTHER; note = 2'-O-Methyl-uridine
  modified_base 72: mod_base = OTHER; note = 2'-O-Methyl-uridine
  modified_base 73: mod_base = OTHER; note = 2'-O-Methyl-guanosine
  modified_base 74: mod_base = OTHER; note = 2'-O-Methyl-adenosine
  modified_base 75: mod_base = OTHER; note = 2'-O-Methyl-adenosine
  modified_base 76: mod_base = OTHER; note = 2'-O-Methyl-adenosine
  modified_base 77: mod_base = OTHER; note = 2'-O-Methyl-adenosine
  modified_base 78: mod_base = OTHER; note = 2'-O-Methyl-adenosine
  modified_base 79: mod_base = OTHER; note = 2'-O-Methyl-guanosine
  modified_base 80: mod_base = OTHER; note = 2'-O-Methyl-uridine
  modified_base 82: mod_base = OTHER; note = 2'-O-Methyl-guanosine
  modified_base 83: mod_base = OTHER; note = 2'-O-Methyl-cytidine
  modified_base 84: mod_base = OTHER; note = 2'-O-Methyl-adenosine
  modified_base 85: mod_base = OTHER; note = 2'-O-Methyl-cytidine
  modified_base 86: mod_base = OTHER; note = 2'-O-Methyl-cytidine
  modified_base 87: mod_base = OTHER; note = 2'-O-Methyl-guanosine
  modified_base 89: mod_base = OTHER; note = 2'-O-Methyl-guanosine
  modified_base 92: mod_base = OTHER; note = 2'-O-Methyl-guanosine
  modified_base 93: mod_base = OTHER; note = 2'-O-Methyl-guanosine
  modified_base 94: mod_base = OTHER; note = 2'-O-Methyl-uridine
  modified_base 95: mod_base = OTHER; note = 2'-O-Methyl-guanosine
  modified_base 96: mod_base = OTHER; note = 2'-O-Methyl-cytidine
  modified_base 97: mod_base = OTHER; note = 2'-O-Methyl-uridine phosphorothioate
  modified_base 98: mod_base = OTHER; note = 2'-O-Methyl-uridine phosphorothioate
  modified_base 99: mod_base = OTHER; note = 2'-O-Methyl-uridine phosphorothioate
  modified_base 100: mod_base = OTHER; note = 2'-O-Methyl-uridine
  misc_difference 101: note = a, c, g, inosine, u, deoxyadenosine, deoxyguanosine, deoxycytidine, deoxyinosine, thymine, ribonebularine, 2'-O-methylnebularine, or 2'-deoxynebularine
  misc_difference 102: note = a, c, g, inosine, u, deoxyadenosine, deoxyguanosine, deoxycytidine, deoxyinosine, thymine, ribonebularine, 2'-O-methylnebularine, or 2'-deoxynebularine
  misc_difference 103: note = a, c, g, inosine, u, deoxyadenosine, deoxyguanosine, deoxycytidine, deoxyinosine, thymine, ribonebularine, 2'-O-methylnebularine, or 2'-deoxynebularine

SEQ ID NO: 2845 - RNA, 103 nt, synthetic construct; identical to SEQ ID NO: 1797
  source 1..103: mol_type = other RNA
  modified_base 1: mod_base = OTHER; note = 2'-O-Methyl-cytidine phosphorothioate
  modified_base 2: mod_base = OTHER; note = 2'-O-Methyl-adenosine phosphorothioate
  modified_base 3: mod_base = OTHER; note = 2'-O-Methyl-guanosine phosphorothioate
  modified_base 21: mod_base = OTHER; note = 2'-O-Methyl-guanosine
  modified_base 25: mod_base = OTHER; note = uridine phosphorothioate
  modified_base 28: mod_base = OTHER; note = 2'-O-Methyl-adenosine
  modified_base 29: mod_base = OTHER; note = 2'-O-Methyl-guanosine
  modified_base 30: mod_base = OTHER; note = 2'-O-Methyl-cytidine
  modified_base 31: mod_base = OTHER; note = 2'-O-Methyl-uridine
  modified_base 32: mod_base = OTHER; note = 2'-O-Methyl-adenosine
  modified_base 34: mod_base = OTHER; note = 2'-O-Methyl-adenosine
  modified_base 35: mod_base = OTHER; note = 2'-O-Methyl-adenosine
  modified_base 36: mod_base = OTHER; note = 2'-O-Methyl-adenosine
  modified_base 37: mod_base = OTHER; note = 2'-O-Methyl-uridine
  modified_base 38: mod_base = OTHER; note = 2'-O-Methyl-adenosine
  modified_base 39: mod_base = OTHER; note = 2'-O-Methyl-guanosine
  modified_base 40: mod_base = OTHER; note = 2'-O-Methyl-cytidine
  modified_base 41: mod_base = OTHER; note = 2'-O-Methyl-adenosine
  modified_base 42: mod_base = OTHER; note = 2'-O-Methyl-adenosine
  modified_base 45: mod_base = OTHER; note = uridine phosphorothioate
  modified_base 46: mod_base = OTHER; note = 2'-O-Methyl-adenosine
  modified_base 48: mod_base = OTHER; note = 2'-O-Methyl-adenosine
  modified_base 50: mod_base = OTHER; note = 2'-O-Methyl-uridine
  modified_base 52: mod_base = OTHER; note = 2'-O-Methyl-adenosine
  modified_base 53: mod_base = OTHER; note = 2'-O-Methyl-guanosine
  modified_base 54: mod_base = OTHER; note = 2'-O-Methyl-guanosine
  modified_base 57: mod_base = OTHER; note = 2'-O-Methyl-adenosine
  modified_base 61: mod_base = OTHER; note = 2'-O-Methyl-cytidine
  modified_base 64: mod_base = OTHER; note = uridine phosphorothioate
  modified_base 66: mod_base = OTHER; note = 2'-O-Methyl-uridine
  modified_base 67: mod_base = OTHER; note = 2'-O-Methyl-cytidine
  modified_base 70: mod_base = OTHER; note = 2'-O-Methyl-cytidine
  modified_base 71: mod_base = OTHER; note = 2'-O-Methyl-uridine
  modified_base 72: mod_base = OTHER; note = 2'-O-Methyl-uridine
  modified_base 73: mod_base = OTHER; note = 2'-O-Methyl-guanosine
  modified_base 74: mod_base = OTHER; note = 2'-O-Methyl-adenosine
  modified_base 75: mod_base = OTHER; note = 2'-O-Methyl-adenosine
  modified_base 76: mod_base = OTHER; note = 2'-O-Methyl-adenosine
  modified_base 77: mod_base = OTHER; note = 2'-O-Methyl-adenosine
  modified_base 78: mod_base = OTHER; note = 2'-O-Methyl-adenosine
  modified_base 79: mod_base = OTHER; note = 2'-O-Methyl-guanosine
  modified_base 80: mod_base = OTHER; note = 2'-O-Methyl-uridine
  modified_base 82: mod_base = OTHER; note = 2'-O-Methyl-guanosine
  modified_base 83: mod_base = OTHER; note = 2'-O-Methyl-cytidine
  modified_base 84: mod_base = OTHER; note = 2'-O-Methyl-adenosine
  modified_base 85: mod_base = OTHER; note = 2'-O-Methyl-cytidine
  modified_base 86: mod_base = OTHER; note = 2'-O-Methyl-cytidine
  modified_base 87: mod_base = OTHER; note = 2'-O-Methyl-guanosine
  modified_base 89: mod_base = OTHER; note = 2'-O-Methyl-guanosine
  modified_base 91: mod_base = OTHER; note = 2'-O-Methyl-cytidine
  modified_base 92: mod_base = OTHER; note = 2'-O-Methyl-guanosine
  modified_base 93: mod_base = OTHER; note = 2'-O-Methyl-guanosine
  modified_base 94: mod_base = OTHER; note = 2'-O-Methyl-uridine
  modified_base 95: mod_base = OTHER; note = 2'-O-Methyl-guanosine
  modified_base 96: mod_base = OTHER; note = 2'-O-Methyl-cytidine
  modified_base 97: mod_base = OTHER; note = 2'-O-Methyl-uridine phosphorothioate
  modified_base 98: mod_base = OTHER; note = 2'-O-Methyl-uridine phosphorothioate
  modified_base 99: mod_base = OTHER; note = 2'-O-Methyl-uridine phosphorothioate
  modified_base 100: mod_base = OTHER; note = 2'-O-Methyl-uridine
  misc_difference 101: note = a, c, g, inosine, u, deoxyadenosine, deoxyguanosine, deoxycytidine, deoxyinosine, thymine, ribonebularine, 2'-O-methylnebularine, or 2'-deoxynebularine
  misc_difference 102: note = a, c, g, inosine, u, deoxyadenosine, deoxyguanosine, deoxycytidine, deoxyinosine, thymine, ribonebularine, 2'-O-methylnebularine, or 2'-deoxynebularine
  misc_difference 103: note = a, c, g, inosine, u, deoxyadenosine, deoxyguanosine, deoxycytidine, deoxyinosine, thymine, ribonebularine, 2'-O-methylnebularine, or 2'-deoxynebularine

SEQ ID NO: 2846 - RNA, 103 nt, synthetic construct; identical to SEQ ID NO: 1797
  source 1..103: mol_type = other RNA
  modified_base 1: mod_base = OTHER; note = 2'-O-Methyl-cytidine phosphorothioate
  modified_base 2: mod_base = OTHER; note = 2'-O-Methyl-adenosine phosphorothioate
  modified_base 3: mod_base = OTHER; note = 2'-O-Methyl-guanosine phosphorothioate
  modified_base 21: mod_base = OTHER; note = 2'-O-Methyl-guanosine
  modified_base 25: mod_base = OTHER; note = uridine phosphorothioate
  modified_base 28: mod_base = OTHER; note = 2'-O-Methyl-adenosine
  modified_base 29: mod_base = OTHER; note = 2'-O-Methyl-guanosine
  modified_base 30: mod_base = OTHER; note = 2'-O-Methyl-cytidine
  modified_base 31: mod_base = OTHER; note = 2'-O-Methyl-uridine
  modified_base 32: mod_base = OTHER; note = 2'-O-Methyl-adenosine
  modified_base 34: mod_base = OTHER; note = 2'-O-Methyl-adenosine
  modified_base 35: mod_base = OTHER; note = 2'-O-Methyl-adenosine
  modified_base 36: mod_base = OTHER; note = 2'-O-Methyl-adenosine
  modified_base 37: mod_base = OTHER; note = 2'-O-Methyl-uridine
  modified_base 38: mod_base = OTHER; note = 2'-O-Methyl-adenosine
  modified_base 39: mod_base = OTHER; note = 2'-O-Methyl-guanosine
  modified_base 40: mod_base = OTHER; note = 2'-O-Methyl-cytidine
  modified_base 41: mod_base = OTHER; note = 2'-O-Methyl-adenosine
  modified_base 42: mod_base = OTHER; note = 2'-O-Methyl-adenosine
  modified_base 45: mod_base = OTHER; note = uridine phosphorothioate
  modified_base 46: mod_base = OTHER; note = 2'-O-Methyl-adenosine
  modified_base 48: mod_base = OTHER; note = 2'-O-Methyl-adenosine
  modified_base 50: mod_base = OTHER; note = 2'-O-Methyl-uridine
  modified_base 52: mod_base = OTHER; note = 2'-O-Methyl-adenosine
  modified_base 53: mod_base = OTHER; note = 2'-O-Methyl-guanosine
  modified_base 54: mod_base = OTHER; note = 2'-O-Methyl-guanosine
  modified_base 55: mod_base = OTHER; note = 2'-O-Methyl-cytidine
  modified_base 56: mod_base = OTHER; note = 2'-O-Methyl-uridine
  modified_base 57: mod_base = OTHER; note = 2'-O-Methyl-adenosine
  modified_base 60: mod_base = OTHER; note = 2'-O-Methyl-cytidine
  modified_base 61: mod_base = OTHER; note = 2'-O-Methyl-cytidine
  modified_base 64: mod_base = OTHER; note = uridine phosphorothioate
  modified_base 66: mod_base = OTHER; note = 2'-O-Methyl-uridine
  modified_base 67: mod_base = OTHER; note = 2'-O-Methyl-cytidine
  modified_base 70: mod_base = OTHER; note = 2'-O-Methyl-cytidine
  modified_base 71: mod_base = OTHER; note = 2'-O-Methyl-uridine
  modified_base 72: mod_base = OTHER; note = 2'-O-Methyl-uridine
  modified_base 74: mod_base = OTHER; note = 2'-O-Methyl-adenosine
  modified_base 75: mod_base = OTHER; note = 2'-O-Methyl-adenosine
  modified_base 76: mod_base = OTHER; note = 2'-O-Methyl-adenosine
  modified_base 77: mod_base = OTHER; note = 2'-O-Methyl-adenosine
  modified_base 78: mod_base = OTHER; note = 2'-O-Methyl-adenosine
  modified_base 79: mod_base = OTHER; note = 2'-O-Methyl-guanosine
  modified_base 80: mod_base = OTHER; note = 2'-O-Methyl-uridine
  modified_base 82: mod_base = OTHER; note = 2'-O-Methyl-guanosine
  modified_base 83: mod_base = OTHER; note = 2'-O-Methyl-cytidine
  modified_base 84: mod_base = OTHER; note = 2'-O-Methyl-adenosine
  modified_base 85: mod_base = OTHER; note = 2'-O-Methyl-cytidine
  modified_base 86: mod_base = OTHER; note = 2'-O-Methyl-cytidine
  modified_base 87: mod_base = OTHER; note = 2'-O-Methyl-guanosine
  modified_base 89: mod_base = OTHER; note = 2'-O-Methyl-guanosine
  modified_base 92: mod_base = OTHER; note = 2'-O-Methyl-guanosine
  modified_base 93: mod_base = OTHER; note = 2'-O-Methyl-guanosine
  modified_base 94: mod_base = OTHER; note = 2'-O-Methyl-uridine
  modified_base 95: mod_base = OTHER; note = 2'-O-Methyl-guanosine
  modified_base 96: mod_base = OTHER; note = 2'-O-Methyl-cytidine
  modified_base 97: mod_base = OTHER; note = 2'-O-Methyl-uridine phosphorothioate
  modified_base 98: mod_base = OTHER; note = 2'-O-Methyl-uridine phosphorothioate
  modified_base 99: mod_base = OTHER; note = 2'-O-Methyl-uridine phosphorothioate
  modified_base 100: mod_base = OTHER; note = 2'-O-Methyl-uridine
  misc_difference 101: note = a, c, g, inosine, u, deoxyadenosine, deoxyguanosine, deoxycytidine, deoxyinosine, thymine, ribonebularine, 2'-O-methylnebularine, or 2'-deoxynebularine
  misc_difference 102: note = a, c, g, inosine, u, deoxyadenosine, deoxyguanosine, deoxycytidine, deoxyinosine, thymine, ribonebularine, 2'-O-methylnebularine, or 2'-deoxynebularine
  misc_difference 103: note = a, c, g, inosine, u, deoxyadenosine, deoxyguanosine, deoxycytidine, deoxyinosine, thymine, ribonebularine, 2'-O-methylnebularine, or 2'-deoxynebularine

SEQ ID NO: 2847 - RNA, 103 nt, synthetic construct; identical to SEQ ID NO: 1797
  source 1..103: mol_type = other RNA
  modified_base 1: mod_base = OTHER; note = 2'-O-Methyl-cytidine phosphorothioate
  modified_base 2: mod_base = OTHER; note = 2'-O-Methyl-adenosine phosphorothioate
  modified_base 3: mod_base = OTHER; note = 2'-O-Methyl-guanosine
  modified_base 21: mod_base = OTHER; note = 2'-O-Methyl-guanosine
  modified_base 28: mod_base = OTHER; note = 2'-O-Methyl-adenosine
  modified_base 29: mod_base = OTHER; note = 2'-O-Methyl-guanosine
  modified_base 30: mod_base = OTHER; note = 2'-O-Methyl-cytidine
  modified_base 31: mod_base = OTHER; note = 2'-O-Methyl-uridine
  modified_base 32: mod_base = OTHER; note = 2'-O-Methyl-adenosine
  modified_base 33: mod_base = OTHER; note = 2'-O-Methyl-guanosine
  modified_base 34: mod_base = OTHER; note = 2'-O-Methyl-adenosine
  modified_base 35: mod_base = OTHER; note = 2'-O-Methyl-adenosine
  modified_base 36: mod_base = OTHER; note = 2'-O-Methyl-adenosine
  modified_base 37: mod_base = OTHER; note = 2'-O-Methyl-uridine
  modified_base 38: mod_base = OTHER; note = 2'-O-Methyl-adenosine
  modified_base 39: mod_base = OTHER; note = 2'-O-Methyl-guanosine
  modified_base 40: mod_base = OTHER; note = 2'-O-Methyl-cytidine
  modified_base 41: mod_base = OTHER; note = 2'-O-Methyl-adenosine
  modified_base 42: mod_base = OTHER; note = 2'-O-Methyl-adenosine
  modified_base 46: mod_base = OTHER; note = 2'-O-Methyl-adenosine
  modified_base 48: mod_base = OTHER; note = 2'-O-Methyl-adenosine
  modified_base 50: mod_base = OTHER; note = 2'-O-Methyl-uridine
  modified_base 52: mod_base = OTHER; note = 2'-O-Methyl-adenosine
  modified_base 53: mod_base = OTHER; note = 2'-O-Methyl-guanosine
  modified_base 54: mod_base = OTHER; note = 2'-O-Methyl-guanosine
  modified_base 55: mod_base = OTHER; note = 2'-O-Methyl-cytidine
  modified_base 56: mod_base = OTHER; note = 2'-O-Methyl-uridine
  modified_base 57: mod_base = OTHER; note = 2'-O-Methyl-adenosine
  modified_base 60: mod_base = OTHER; note = 2'-O-Methyl-cytidine
  modified_base 61: mod_base = OTHER; note = 2'-O-Methyl-cytidine
  modified_base 66: mod_base = OTHER; note = 2'-O-Methyl-uridine
  modified_base 67: mod_base = OTHER; note = 2'-O-Methyl-cytidine
  modified_base 70: mod_base = OTHER; note = 2'-O-Methyl-cytidine
  modified_base 71: mod_base = OTHER; note = 2'-O-Methyl-uridine
  modified_base 72: mod_base = OTHER; note = 2'-O-Methyl-uridine
  modified_base 73: mod_base = OTHER; note = 2'-O-Methyl-guanosine
  modified_base 74: mod_base = OTHER; note = 2'-O-Methyl-adenosine
  modified_base 75: mod_base = OTHER; note = 2'-O-Methyl-adenosine
  modified_base 76: mod_base = OTHER; note = 2'-O-Methyl-adenosine
  modified_base 77: mod_base = OTHER; note = 2'-O-Methyl-adenosine
  modified_base 78: mod_base = OTHER; note = 2'-O-Methyl-adenosine
  modified_base 79: mod_base = OTHER; note = 2'-O-Methyl-guanosine
  modified_base 80: mod_base = OTHER; note = 2'-O-Methyl-uridine
  modified_base 81: mod_base = OTHER; note = 2'-O-Methyl-guanosine
  modified_base 83: mod_base = OTHER; note = 2'-O-Methyl-cytidine
  modified_base 84: mod_base = OTHER; note = 2'-O-Methyl-adenosine
  modified_base 85: mod_base = OTHER; note = 2'-O-Methyl-cytidine
  modified_base 86: mod_base = OTHER; note = 2'-O-Methyl-cytidine
  modified_base 87: mod_base = OTHER; note = 2'-O-Methyl-guanosine
  modified_base 88: mod_base = OTHER; note = 2'-O-Methyl-adenosine
  modified_base 89: mod_base = OTHER; note = 2'-O-Methyl-guanosine
  modified_base 90: mod_base = OTHER; note = 2'-O-Methyl-uridine
  modified_base 91: mod_base = OTHER; note = 2'-O-Methyl-cytidine
  modified_base 92: mod_base = OTHER; note = 2'-O-Methyl-guanosine
  modified_base 93: mod_base = OTHER; note = 2'-O-Methyl-guanosine
  modified_base 94: mod_base = OTHER; note = 2'-O-Methyl-uridine
  modified_base 95: mod_base = OTHER; note = 2'-O-Methyl-guanosine
  modified_base 96: mod_base = OTHER; note = 2'-O-Methyl-cytidine
  modified_base 97: mod_base = OTHER; note = 2'-O-Methyl-uridine phosphorothioate
  modified_base 98: mod_base = OTHER; note = 2'-O-Methyl-uridine phosphorothioate
  modified_base 99: mod_base = OTHER; note = 2'-O-Methyl-uridine phosphorothioate
  modified_base 100: mod_base = OTHER; note = 2'-O-Methyl-uridine
  misc_difference 101: note = a, c, g, inosine, u, deoxyadenosine, deoxyguanosine, deoxycytidine, deoxyinosine, thymine, ribonebularine, 2'-O-methylnebularine, or 2'-deoxynebularine
  misc_difference 102: note = a, c, g, inosine, u, deoxyadenosine, deoxyguanosine, deoxycytidine, deoxyinosine, thymine, ribonebularine, 2'-O-methylnebularine, or 2'-deoxynebularine
  misc_difference 103: note = a, c, g, inosine, u, deoxyadenosine, deoxyguanosine, deoxycytidine, deoxyinosine, thymine, ribonebularine, 2'-O-methylnebularine, or 2'-deoxynebularine

SEQ ID NO: 2848 - RNA, 103 nt, synthetic construct; identical to SEQ ID NO: 1795
  source 1..103: mol_type = other RNA
  modified_base 1: mod_base = OTHER; note = 2'-O-Methyl-cytidine phosphorothioate
  modified_base 2: mod_base = OTHER; note = 2'-O-Methyl-cytidine phosphorothioate
  modified_base 3: mod_base = OTHER; note = 2'-O-Methyl-cytidine
  modified_base 21: mod_base = OTHER; note = 2'-O-Methyl-guanosine
  modified_base 28: mod_base = OTHER; note = 2'-O-Methyl-adenosine
  modified_base 29: mod_base = OTHER; note = 2'-O-Methyl-guanosine
  modified_base 30: mod_base = OTHER; note = 2'-O-Methyl-cytidine
  modified_base 31: mod_base = OTHER; note = 2'-O-Methyl-uridine
  modified_base 32: mod_base = OTHER; note = 2'-O-Methyl-adenosine
  modified_base 33: mod_base = OTHER; note = 2'-O-Methyl-guanosine
  modified_base 34: mod_base = OTHER; note = 2'-O-Methyl-adenosine
  modified_base 35: mod_base = OTHER; note = 2'-O-Methyl-adenosine
  modified_base 36: mod_base = OTHER; note = 2'-O-Methyl-adenosine
  modified_base 37: mod_base = OTHER; note = 2'-O-Methyl-uridine
  modified_base 38: mod_base = OTHER; note = 2'-O-Methyl-adenosine
  modified_base 39: mod_base = OTHER; note = 2'-O-Methyl-guanosine
  modified_base 40: mod_base = OTHER; note = 2'-O-Methyl-cytidine
  modified_base 41: mod_base = OTHER; note = 2'-O-Methyl-adenosine
  modified_base 42: mod_base = OTHER; note = 2'-O-Methyl-adenosine
  modified_base 46: mod_base = OTHER; note = 2'-O-Methyl-adenosine
  modified_base 48: mod_base = OTHER; note = 2'-O-Methyl-adenosine
  modified_base 50: mod_base = OTHER; note = 2'-O-Methyl-uridine
  modified_base 52: mod_base = OTHER; note = 2'-O-Methyl-adenosine
  modified_base 53: mod_base = OTHER; note = 2'-O-Methyl-guanosine
  modified_base 54: mod_base = OTHER; note = 2'-O-Methyl-guanosine
  modified_base 55: mod_base = OTHER; note = 2'-O-Methyl-cytidine
  modified_base 56: mod_base = OTHER; note = 2'-O-Methyl-uridine
  modified_base 57: mod_base = OTHER; note = 2'-O-Methyl-adenosine
  modified_base 60: mod_base = OTHER; note = 2'-O-Methyl-cytidine
  modified_base 61: mod_base = OTHER; note = 2'-O-Methyl-cytidine
  modified_base 66: mod_base = OTHER; note = 2'-O-Methyl-uridine
  modified_base 67: mod_base = OTHER; note = 2'-O-Methyl-cytidine
  modified_base 70: mod_base = OTHER; note = 2'-O-Methyl-cytidine
  modified_base 71: mod_base = OTHER; note = 2'-O-Methyl-uridine
  modified_base 72: mod_base = OTHER; note = 2'-O-Methyl-uridine
  modified_base 73: mod_base = OTHER; note = 2'-O-Methyl-guanosine
  modified_base 74: mod_base = OTHER; note = 2'-O-Methyl-adenosine
  modified_base 75: mod_base = OTHER; note = 2'-O-Methyl-adenosine
  modified_base 76: mod_base = OTHER; note = 2'-O-Methyl-adenosine
  modified_base 77: mod_base = OTHER; note = 2'-O-Methyl-adenosine
  modified_base 78: mod_base = OTHER; note = 2'-O-Methyl-adenosine
  modified_base 79: mod_base = OTHER; note = 2'-O-Methyl-guanosine
  modified_base 80: mod_base = OTHER; note = 2'-O-Methyl-uridine
  modified_base 81: mod_base = OTHER; note = 2'-O-Methyl-guanosine
  modified_base 83: mod_base = OTHER; note = 2'-O-Methyl-cytidine
  modified_base 84: mod_base = OTHER; note = 2'-O-Methyl-adenosine
  modified_base 85: mod_base = OTHER; note = 2'-O-Methyl-cytidine
  modified_base 86: mod_base = OTHER; note = 2'-O-Methyl-cytidine
  modified_base 87: mod_base = OTHER; note = 2'-O-Methyl-guanosine
  modified_base 88: mod_base = OTHER; note = 2'-O-Methyl-adenosine
  modified_base 89: mod_base = OTHER; note = 2'-O-Methyl-guanosine
  modified_base 90: mod_base = OTHER; note = 2'-O-Methyl-uridine
  modified_base 91: mod_base = OTHER; note = 2'-O-Methyl-cytidine
  modified_base 92: mod_base = OTHER; note = 2'-O-Methyl-guanosine
  modified_base 93: mod_base = OTHER; note = 2'-O-Methyl-guanosine
  modified_base 94: mod_base = OTHER; note = 2'-O-Methyl-uridine
  modified_base 95: mod_base = OTHER; note = 2'-O-Methyl-guanosine
  modified_base 96: mod_base = OTHER; note = 2'-O-Methyl-cytidine
  modified_base 97: mod_base = OTHER; note = 2'-O-Methyl-uridine phosphorothioate
  modified_base 98: mod_base = OTHER; note = 2'-O-Methyl-uridine phosphorothioate
  modified_base 99: mod_base = OTHER; note = 2'-O-Methyl-uridine phosphorothioate
  modified_base 100: mod_base = OTHER; note = 2'-O-Methyl-uridine
  misc_difference 101: note = a, c, g, inosine, u, deoxyadenosine, deoxyguanosine, deoxycytidine, deoxyinosine, thymine, ribonebularine, 2'-O-methylnebularine, or 2'-deoxynebularine
  misc_difference 102: note = a, c, g, inosine, u, deoxyadenosine, deoxyguanosine, deoxycytidine, deoxyinosine, thymine, ribonebularine, 2'-O-methylnebularine, or 2'-deoxynebularine
  misc_difference 103: note = a, c, g, inosine, u, deoxyadenosine, deoxyguanosine, deoxycytidine, deoxyinosine, thymine, ribonebularine, 2'-O-methylnebularine, or 2'-deoxynebularine

SEQ ID NO: 2849 - RNA, 103 nt, synthetic construct; identical to SEQ ID NO: 1795
  source 1..103: mol_type = other RNA
  modified_base 1: mod_base = OTHER; note = 2'-O-Methyl-cytidine phosphorothioate
  modified_base 2: mod_base = OTHER; note = 2'-O-Methyl-cytidine phosphorothioate
  modified_base 3: mod_base = OTHER; note = 2'-O-Methyl-cytidine
  modified_base 21: mod_base = OTHER; note = 2'-O-Methyl-guanosine
  modified_base 28: mod_base = OTHER; note = 2'-O-Methyl-adenosine
  modified_base 29: mod_base = OTHER; note = 2'-O-Methyl-guanosine
  modified_base 30: mod_base = OTHER; note = 2'-O-Methyl-cytidine
  modified_base 31: mod_base = OTHER; note = 2'-O-Methyl-uridine
  modified_base 32: mod_base = OTHER; note = 2'-O-Methyl-adenosine
  modified_base 34: mod_base = OTHER; note = 2'-O-Methyl-adenosine
  modified_base 35: mod_base = OTHER; note = 2'-O-Methyl-adenosine
  modified_base 36: mod_base = OTHER; note = 2'-O-Methyl-adenosine
  modified_base 37: mod_base = OTHER; note = 2'-O-Methyl-uridine
  modified_base 38: mod_base = OTHER; note = 2'-O-Methyl-adenosine
  modified_base 39: mod_base = OTHER; note = 2'-O-Methyl-guanosine
  modified_base 40: mod_base = OTHER; note = 2'-O-Methyl-cytidine
  modified_base 41: mod_base = OTHER; note = 2'-O-Methyl-adenosine
  modified_base 42: mod_base = OTHER; note = 2'-O-Methyl-adenosine
  modified_base 46: mod_base = OTHER; note = 2'-O-Methyl-adenosine
  modified_base 48: mod_base = OTHER; note = 2'-O-Methyl-adenosine
  modified_base 50: mod_base = OTHER; note = 2'-O-Methyl-uridine
  modified_base 52: mod_base = OTHER; note = 2'-O-Methyl-adenosine
  modified_base 53: mod_base = OTHER; note = 2'-O-Methyl-guanosine
  modified_base 54: mod_base = OTHER; note = 2'-O-Methyl-guanosine
  modified_base 55: mod_base = OTHER; note = 2'-O-Methyl-cytidine
  modified_base 56: mod_base = OTHER; note = 2'-O-Methyl-uridine
  modified_base 57: mod_base = OTHER; note = 2'-O-Methyl-adenosine
  modified_base 60: mod_base = OTHER; note = 2'-O-Methyl-cytidine
  modified_base 61: mod_base = OTHER; note = 2'-O-Methyl-cytidine
  modified_base 66: mod_base = OTHER; note = 2'-O-Methyl-uridine
  modified_base 67: mod_base = OTHER; note = 2'-O-Methyl-cytidine
  modified_base 70: mod_base = OTHER; note = 2'-O-Methyl-cytidine
  modified_base 71: mod_base = OTHER; note = 2'-O-Methyl-uridine
  modified_base 72: mod_base = OTHER; note = 2'-O-Methyl-uridine
  modified_base 74: mod_base = OTHER; note = 2'-O-Methyl-adenosine
  modified_base 75: mod_base = OTHER; note = 2'-O-Methyl-adenosine
  modified_base 76: mod_base = OTHER; note = 2'-O-Methyl-adenosine
  modified_base 77: mod_base = OTHER; note = 2'-O-Methyl-adenosine
  modified_base 78: mod_base = OTHER; note = 2'-O-Methyl-adenosine
  modified_base 79: mod_base = OTHER; note = 2'-O-Methyl-guanosine
  modified_base 80: mod_base = OTHER; note = 2'-O-Methyl-uridine
  modified_base 81: mod_base = OTHER; note = 2'-O-Methyl-guanosine
  modified_base 83: mod_base = OTHER; note = 2'-O-Methyl-cytidine
  modified_base 84: mod_base = OTHER; note = 2'-O-Methyl-adenosine
  modified_base 85: mod_base = OTHER; note = 2'-O-Methyl-cytidine
  modified_base 86: mod_base = OTHER; note = 2'-O-Methyl-cytidine
  modified_base 87: mod_base = OTHER; note = 2'-O-Methyl-guanosine
  modified_base 88: mod_base = OTHER; note = 2'-O-Methyl-adenosine
  modified_base 89: mod_base = OTHER; note = 2'-O-Methyl-guanosine
  modified_base 90: mod_base = OTHER; note = 2'-O-Methyl-uridine
  modified_base 91: mod_base = OTHER; note = 2'-O-Methyl-cytidine
  modified_base 92: mod_base = OTHER; note = 2'-O-Methyl-guanosine
  modified_base 93: mod_base = OTHER; note = 2'-O-Methyl-guanosine
  modified_base 94: mod_base = OTHER; note = 2'-O-Methyl-uridine
  modified_base 95: mod_base = OTHER; note = 2'-O-Methyl-guanosine
  modified_base 96: mod_base = OTHER; note = 2'-O-Methyl-cytidine
  modified_base 97: mod_base = OTHER; note = 2'-O-Methyl-uridine phosphorothioate
  modified_base 98: mod_base = OTHER; note = 2'-O-Methyl-uridine phosphorothioate
  modified_base 99: mod_base = OTHER; note = 2'-O-Methyl-uridine phosphorothioate
  modified_base 100: mod_base = OTHER; note = 2'-O-Methyl-uridine
  misc_difference 101: note = a, c, g, inosine, u, deoxyadenosine, deoxyguanosine, deoxycytidine, deoxyinosine, thymine, ribonebularine, 2'-O-methylnebularine, or 2'-deoxynebularine
  misc_difference 102: note = a, c, g, inosine, u, deoxyadenosine, deoxyguanosine, deoxycytidine, deoxyinosine, thymine, ribonebularine, 2'-O-methylnebularine, or 2'-deoxynebularine
  misc_difference 103: note = a, c, g, inosine, u, deoxyadenosine, deoxyguanosine, deoxycytidine, deoxyinosine, thymine, ribonebularine, 2'-O-methylnebularine, or 2'-deoxynebularine

SEQ ID NO: 2850 - RNA, 103 nt, synthetic construct; identical to SEQ ID NO: 1796
  source 1..103: mol_type = other RNA
  modified_base 1: mod_base = OTHER; note = 2'-O-Methyl-guanosine phosphorothioate
  modified_base 2: mod_base = OTHER; note = 2'-O-Methyl-adenosine phosphorothioate
  modified_base 3: mod_base = OTHER; note = 2'-O-Methyl-guanosine
  modified_base 21: mod_base = OTHER; note = 2'-O-Methyl-guanosine
  modified_base 28: mod_base = OTHER; note = 2'-O-Methyl-adenosine
  modified_base 29: mod_base = OTHER; note = 2'-O-Methyl-guanosine
  modified_base 30: mod_base = OTHER; note = 2'-O-Methyl-cytidine
  modified_base 31: mod_base = OTHER; note = 2'-O-Methyl-uridine
  modified_base 32: mod_base = OTHER; note = 2'-O-Methyl-adenosine
  modified_base 33: mod_base = OTHER; note = 2'-O-Methyl-guanosine
  modified_base 34: mod_base = OTHER; note = 2'-O-Methyl-adenosine
  modified_base 35: mod_base = OTHER; note = 2'-O-Methyl-adenosine
  modified_base 36: mod_base = OTHER; note = 2'-O-Methyl-adenosine
  modified_base 37: mod_base = OTHER; note = 2'-O-Methyl-uridine
  modified_base 38: mod_base = OTHER; note = 2'-O-Methyl-adenosine
  modified_base 39: mod_base = OTHER; note = 2'-O-Methyl-guanosine
  modified_base 40: mod_base = OTHER; note = 2'-O-Methyl-cytidine
  modified_base 41: mod_base = OTHER; note = 2'-O-Methyl-adenosine
  modified_base 42: mod_base = OTHER; note = 2'-O-Methyl-adenosine
  modified_base 46: mod_base = OTHER; note = 2'-O-Methyl-adenosine
  modified_base 48: mod_base = OTHER; note = 2'-O-Methyl-adenosine
  modified_base 50: mod_base = OTHER; note = 2'-O-Methyl-uridine
  modified_base 52: mod_base = OTHER; note = 2'-O-Methyl-adenosine
  modified_base 53: mod_base = OTHER; note = 2'-O-Methyl-guanosine
  modified_base 54: mod_base = OTHER; note = 2'-O-Methyl-guanosine
  modified_base 55: mod_base = OTHER; note = 2'-O-Methyl-cytidine
  modified_base 56: mod_base = OTHER; note = 2'-O-Methyl-uridine
  modified_base 57: mod_base = OTHER; note = 2'-O-Methyl-adenosine
  modified_base 60: mod_base = OTHER; note = 2'-O-Methyl-cytidine
  modified_base 61: mod_base = OTHER; note = 2'-O-Methyl-cytidine
  modified_base 66: mod_base = OTHER; note = 2'-O-Methyl-uridine
  modified_base 67: mod_base = OTHER; note = 2'-O-Methyl-cytidine
  modified_base 70: mod_base = OTHER; note = 2'-O-Methyl-cytidine
  modified_base 71: mod_base = OTHER; note = 2'-O-Methyl-uridine
  modified_base 72: mod_base = OTHER; note = 2'-O-Methyl-uridine
  modified_base 73: mod_base = OTHER; note = 2'-O-Methyl-guanosine
  modified_base 74: mod_base = OTHER; note = 2'-O-Methyl-adenosine
  modified_base 75: mod_base = OTHER; note = 2'-O-Methyl-adenosine
  modified_base 76: mod_base = OTHER; note = 2'-O-Methyl-adenosine
  modified_base 77: mod_base = OTHER; note = 2'-O-Methyl-adenosine
  modified_base 78: mod_base = OTHER; note = 2'-O-Methyl-adenosine
  modified_base 79: mod_base = OTHER; note = 2'-O-Methyl-guanosine
  modified_base 80: mod_base = OTHER; note = 2'-O-Methyl-uridine
  modified_base 81: mod_base = OTHER; note = 2'-O-Methyl-guanosine
  modified_base 83: mod_base = OTHER; note = 2'-O-Methyl-cytidine
  modified_base 84: mod_base = OTHER; note = 2'-O-Methyl-adenosine
  modified_base 85: mod_base = OTHER; note = 2'-O-Methyl-cytidine
  modified_base 86: mod_base = OTHER; note = 2'-O-Methyl-cytidine
  modified_base 87: mod_base = OTHER; note = 2'-O-Methyl-guanosine
  modified_base 88: mod_base = OTHER; note = 2'-O-Methyl-adenosine
  modified_base 89: mod_base = OTHER; note = 2'-O-Methyl-guanosine
  modified_base 90: mod_base = OTHER; note = 2'-O-Methyl-uridine
  modified_base 91: mod_base = OTHER; note = 2'-O-Methyl-cytidine
  modified_base 92: mod_base = OTHER; note = 2'-O-Methyl-guanosine
  modified_base 93: mod_base = OTHER; note = 2'-O-Methyl-guanosine
  modified_base 94: mod_base = OTHER; note = 2'-O-Methyl-uridine
  modified_base 95: mod_base = OTHER; note = 2'-O-Methyl-guanosine
  modified_base 96: mod_base = OTHER; note = 2'-O-Methyl-cytidine
  modified_base 97: mod_base = OTHER; note = 2'-O-Methyl-uridine phosphorothioate
  modified_base 98: mod_base = OTHER; note = 2'-O-Methyl-uridine phosphorothioate
  modified_base 99: mod_base = OTHER; note = 2'-O-Methyl-uridine phosphorothioate
  modified_base 100: mod_base = OTHER; note = 2'-O-Methyl-uridine
  misc_difference 101: note = a, c, g, inosine, u, deoxyadenosine, deoxyguanosine, deoxycytidine, deoxyinosine, thymine, ribonebularine, 2'-O-methylnebularine, or 2'-deoxynebularine
  misc_difference 102: note = a, c, g, inosine, u, deoxyadenosine, deoxyguanosine, deoxycytidine, deoxyinosine, thymine, ribonebularine, 2'-O-methylnebularine, or 2'-deoxynebularine
  misc_difference 103: note = a, c, g, inosine, u, deoxyadenosine, deoxyguanosine, deoxycytidine, deoxyinosine, thymine, ribonebularine, 2'-O-methylnebularine, or 2'-deoxynebularine

SEQ ID NO: 2851 - RNA, 103 nt, synthetic construct; identical to SEQ ID NO: 1796
  source 1..103: mol_type = other RNA
  modified_base 1: mod_base = OTHER; note = 2'-O-Methyl-guanosine phosphorothioate
  modified_base 2: mod_base = OTHER; note = 2'-O-Methyl-adenosine phosphorothioate
  modified_base 3: mod_base = OTHER; note = 2'-O-Methyl-guanosine
  modified_base 21: mod_base = OTHER; note = 2'-O-Methyl-guanosine
  modified_base 28: mod_base = OTHER; note = 2'-O-Methyl-adenosine
  modified_base 29: mod_base = OTHER; note = 2'-O-Methyl-guanosine
  modified_base 30: mod_base = OTHER; note = 2'-O-Methyl-cytidine
  modified_base 31: mod_base = OTHER; note = 2'-O-Methyl-uridine
  modified_base 32: mod_base = OTHER; note = 2'-O-Methyl-adenosine
  modified_base 34: mod_base = OTHER; note = 2'-O-Methyl-adenosine
  modified_base 35: mod_base = OTHER; note = 2'-O-Methyl-adenosine
  modified_base 36: mod_base = OTHER; note = 2'-O-Methyl-adenosine
  modified_base 37: mod_base = OTHER; note = 2'-O-Methyl-uridine
  modified_base 38: mod_base = OTHER; note = 2'-O-Methyl-adenosine
  modified_base 39: mod_base = OTHER; note = 2'-O-Methyl-guanosine
  modified_base 40: mod_base = OTHER; note = 2'-O-Methyl-cytidine
  modified_base 41: mod_base = OTHER; note = 2'-O-Methyl-adenosine
  modified_base 42: mod_base = OTHER; note = 2'-O-Methyl-adenosine
  modified_base 46: mod_base = OTHER; note = 2'-O-Methyl-adenosine
  modified_base 48: mod_base = OTHER; note = 2'-O-Methyl-adenosine
  modified_base 50: mod_base = OTHER; note = 2'-O-Methyl-uridine
  modified_base 52: mod_base = OTHER; note = 2'-O-Methyl-adenosine
  modified_base 53: mod_base = OTHER; note = 2'-O-Methyl-guanosine
  modified_base 54: mod_base = OTHER; note = 2'-O-Methyl-guanosine
  modified_base 55: mod_base = OTHER; note = 2'-O-Methyl-cytidine
  modified_base 56: mod_base = OTHER; note = 2'-O-Methyl-uridine
  modified_base 57: mod_base = OTHER; note = 2'-O-Methyl-adenosine
  modified_base 60: mod_base = OTHER; note = 2'-O-Methyl-cytidine
  modified_base 61: mod_base = OTHER; note = 2'-O-Methyl-cytidine
  modified_base 66: mod_base = OTHER; note = 2'-O-Methyl-uridine
  modified_base 67: mod_base = OTHER; note = 2'-O-Methyl-cytidine
  modified_base 70: mod_base = OTHER; note = 2'-O-Methyl-cytidine
  modified_base 71: mod_base = OTHER; note = 2'-O-Methyl-uridine
  modified_base 72: mod_base = OTHER; note = 2'-O-Methyl-uridine
  modified_base 74: mod_base = OTHER; note = 2'-O-Methyl-adenosine
  modified_base 75: mod_base = OTHER; note = 2'-O-Methyl-adenosine
  modified_base 76: mod_base = OTHER; note = 2'-O-Methyl-adenosine
  modified_base 77: mod_base = OTHER; note = 2'-O-Methyl-adenosine
  modified_base 78: mod_base = OTHER; note = 2'-O-Methyl-adenosine
  modified_base 79: mod_base = OTHER; note = 2'-O-Methyl-guanosine
  modified_base 80: mod_base = OTHER; note = 2'-O-Methyl-uridine
  modified_base 81: mod_base = OTHER; note = 2'-O-Methyl-guanosine
  modified_base 83: mod_base = OTHER; note = 2'-O-Methyl-cytidine
  modified_base 84: mod_base = OTHER; note = 2'-O-Methyl-adenosine
  modified_base 85: mod_base = OTHER; note = 2'-O-Methyl-cytidine
  modified_base 86: mod_base = OTHER; note = 2'-O-Methyl-cytidine
  modified_base 87: mod_base = OTHER; note = 2'-O-Methyl-guanosine
  modified_base 88: mod_base = OTHER; note = 2'-O-Methyl-adenosine
  modified_base 89: mod_base = OTHER; note = 2'-O-Methyl-guanosine
  modified_base 90: mod_base = OTHER; note = 2'-O-Methyl-uridine
  modified_base 91: mod_base = OTHER; note = 2'-O-Methyl-cytidine
  modified_base 92: mod_base = OTHER; note = 2'-O-Methyl-guanosine
  modified_base 93: mod_base = OTHER; note = 2'-O-Methyl-guanosine
  modified_base 94: mod_base = OTHER; note = 2'-O-Methyl-uridine
  modified_base 95: mod_base = OTHER; note = 2'-O-Methyl-guanosine
  modified_base 96: mod_base = OTHER; note = 2'-O-Methyl-cytidine
  modified_base 97: mod_base = OTHER; note = 2'-O-Methyl-uridine phosphorothioate
  modified_base 98: mod_base = OTHER; note = 2'-O-Methyl-uridine phosphorothioate
  modified_base 99: mod_base = OTHER; note = 2'-O-Methyl-uridine phosphorothioate
  modified_base 100: mod_base = OTHER; note = 2'-O-Methyl-uridine
  misc_difference 101: note = a, c, g, inosine, u, deoxyadenosine, deoxyguanosine, deoxycytidine, deoxyinosine, thymine, ribonebularine, 2'-O-methylnebularine, or 2'-deoxynebularine
  misc_difference 102: note = a, c, g, inosine, u, deoxyadenosine, deoxyguanosine, deoxycytidine, deoxyinosine, thymine, ribonebularine, 2'-O-methylnebularine, or 2'-deoxynebularine
  misc_difference 103: note = a, c, g, inosine, u, deoxyadenosine, deoxyguanosine, deoxycytidine, deoxyinosine, thymine, ribonebularine, 2'-O-methylnebularine, or 2'-deoxynebularine

SEQ ID NO: 2852 - RNA, 103 nt, synthetic construct; identical to SEQ ID NO: 1797
  source 1..103: mol_type = other RNA
  modified_base 1: mod_base = OTHER; note = 2'-O-Methyl-cytidine phosphorothioate
  modified_base 2: mod_base = OTHER; note = 2'-O-Methyl-adenosine phosphorothioate
  modified_base 3: mod_base = OTHER; note = 2'-O-Methyl-guanosine
  modified_base 21: mod_base = OTHER; note = 2'-O-Methyl-guanosine
  modified_base 28: mod_base = OTHER; note = 2'-O-Methyl-adenosine
  modified_base 29: mod_base = OTHER; note = 2'-O-Methyl-guanosine
  modified_base 30: mod_base = OTHER; note = 2'-O-Methyl-cytidine
  modified_base 31: mod_base = OTHER; note = 2'-O-Methyl-uridine
  modified_base 32: mod_base = OTHER; note = 2'-O-Methyl-adenosine
  modified_base 34: mod_base = OTHER; note = 2'-O-Methyl-adenosine
  modified_base 35: mod_base = OTHER; note = 2'-O-Methyl-adenosine
  modified_base 36: mod_base = OTHER; note = 2'-O-Methyl-adenosine
  modified_base 37: mod_base = OTHER; note = 2'-O-Methyl-uridine
  modified_base 38: mod_base = OTHER; note = 2'-O-Methyl-adenosine
  modified_base 39: mod_base = OTHER; note = 2'-O-Methyl-guanosine
  modified_base 40: mod_base = OTHER; note = 2'-O-Methyl-cytidine
  modified_base 41: mod_base = OTHER; note = 2'-O-Methyl-adenosine
  modified_base 42: mod_base = OTHER; note = 2'-O-Methyl-adenosine
  modified_base 46: mod_base = OTHER; note = 2'-O-Methyl-adenosine
  modified_base 48: mod_base = OTHER; note = 2'-O-Methyl-adenosine
  modified_base 50: mod_base = OTHER; note = 2'-O-Methyl-uridine
  modified_base 52: mod_base = OTHER; note = 2'-O-Methyl-adenosine
  modified_base 53: mod_base = OTHER; note = 2'-O-Methyl-guanosine
  modified_base 54: mod_base = OTHER; note = 2'-O-Methyl-guanosine
  modified_base 55: mod_base = OTHER; note = 2'-O-Methyl-cytidine
  modified_base 56: mod_base = OTHER; note = 2'-O-Methyl-uridine
  modified_base 57: mod_base = OTHER; note = 2'-O-Methyl-adenosine
  modified_base 60: mod_base = OTHER; note = 2'-O-Methyl-cytidine
  modified_base 61: mod_base = OTHER; note = 2'-O-Methyl-cytidine
  modified_base 66: mod_base = OTHER; note = 2'-O-Methyl-uridine
  modified_base 67: mod_base = OTHER; note = 2'-O-Methyl-cytidine
  modified_base 70: mod_base = OTHER; note = 2'-O-Methyl-cytidine
  modified_base 71: mod_base = OTHER; note = 2'-O-Methyl-uridine
  modified_base 72: mod_base = OTHER; note = 2'-O-Methyl-uridine
  modified_base 74: mod_base = OTHER; note = 2'-O-Methyl-adenosine
  modified_base 75: mod_base = OTHER; note = 2'-O-Methyl-adenosine
  modified_base 76: mod_base = OTHER; note = 2'-O-Methyl-adenosine
  modified_base 77: mod_base = OTHER; note = 2'-O-Methyl-adenosine
  modified_base 78: mod_base = OTHER; note = 2'-O-Methyl-adenosine
  modified_base 79: mod_base = OTHER; note = 2'-O-Methyl-guanosine
  modified_base 80: mod_base = OTHER; note = 2'-O-Methyl-uridine
  modified_base 81: mod_base = OTHER; note = 2'-O-Methyl-guanosine
  modified_base 83: mod_base = OTHER; note = 2'-O-Methyl-cytidine
  modified_base 84: mod_base = OTHER; note = 2'-O-Methyl-adenosine
  modified_base 85: mod_base = OTHER; note = 2'-O-Methyl-cytidine
  modified_base 86: mod_base = OTHER; note = 2'-O-Methyl-cytidine
  modified_base 87: mod_base = OTHER; note = 2'-O-Methyl-guanosine
  modified_base 88: mod_base = OTHER; note = 2'-O-Methyl-adenosine
  modified_base 89: mod_base = OTHER; note = 2'-O-Methyl-guanosine
  modified_base 90: mod_base = OTHER; note = 2'-O-Methyl-uridine
  modified_base 91: mod_base = OTHER; note = 2'-O-Methyl-cytidine
  modified_base 92: mod_base = OTHER; note = 2'-O-Methyl-guanosine
  modified_base 93: mod_base = OTHER; note = 2'-O-Methyl-guanosine
  modified_base 94: mod_base = OTHER; note = 2'-O-Methyl-uridine
  modified_base 95: mod_base = OTHER; note = 2'-O-Methyl-guanosine
  modified_base 96: mod_base = OTHER; note = 2'-O-Methyl-cytidine
  modified_base 97: mod_base = OTHER; note = 2'-O-Methyl-uridine phosphorothioate
  modified_base 98: mod_base = OTHER; note = 2'-O-Methyl-uridine phosphorothioate
  modified_base 99: mod_base = OTHER; note = 2'-O-Methyl-uridine phosphorothioate
  modified_base 100: mod_base = OTHER; note = 2'-O-Methyl-uridine
  misc_difference 101: note = a, c, g, inosine, u, deoxyadenosine, deoxyguanosine, deoxycytidine, deoxyinosine, thymine, ribonebularine, 2'-O-methylnebularine, or 2'-deoxynebularine
  misc_difference 102: note = a, c, g, inosine, u, deoxyadenosine, deoxyguanosine, deoxycytidine, deoxyinosine, thymine, ribonebularine, 2'-O-methylnebularine, or 2'-deoxynebularine
  misc_difference 103: note = a, c, g, inosine, u, deoxyadenosine, deoxyguanosine, deoxycytidine, deoxyinosine, thymine, ribonebularine, 2'-O-methylnebularine, or 2'-deoxynebularine

SEQ ID NO: 2853 - RNA, 103 nt, synthetic construct; identical to SEQ ID NO: 1797
  source 1..103: mol_type = other RNA
  modified_base 1: mod_base = OTHER; note = 2'-O-Methyl-cytidine phosphorothioate
  modified_base 2: mod_base = OTHER; note = 2'-O-Methyl-adenosine phosphorothioate
  modified_base 3: mod_base = OTHER; note = 2'-O-Methyl-guanosine
  modified_base 21: mod_base = OTHER; note = 2'-O-Methyl-guanosine
  modified_base 28: mod_base = OTHER; note = 2'-O-Methyl-adenosine
  modified_base 29: mod_base = OTHER; note = 2'-O-Methyl-guanosine
  modified_base 30: mod_base = OTHER; note = 2'-O-Methyl-cytidine
  modified_base 31: mod_base = OTHER; note = 2'-O-Methyl-uridine
  modified_base 32: mod_base = OTHER; note = 2'-O-Methyl-adenosine
  modified_base 33: mod_base = OTHER; note = 2'-O-Methyl-guanosine
  modified_base 34: mod_base = OTHER; note = 2'-O-Methyl-adenosine
  modified_base 35: mod_base = OTHER; note = 2'-O-Methyl-adenosine
  modified_base 36: mod_base = OTHER; note = 2'-O-Methyl-adenosine
  modified_base 37: mod_base = OTHER; note = 2'-O-Methyl-uridine
  modified_base 38: mod_base = OTHER; note = 2'-O-Methyl-adenosine
  modified_base 39: mod_base = OTHER; note = 2'-O-Methyl-guanosine
  modified_base 40: mod_base = OTHER; note = 2'-O-Methyl-cytidine
  modified_base 41: mod_base = OTHER; note = 2'-O-Methyl-adenosine
  modified_base 42: mod_base = OTHER; note = 2'-O-Methyl-adenosine
  modified_base 46: mod_base = OTHER; note = 2'-O-Methyl-adenosine
  modified_base 48: mod_base = OTHER; note = 2'-O-Methyl-adenosine
  modified_base 50: mod_base = OTHER; note = 2'-O-Methyl-uridine
  modified_base 52: mod_base = OTHER; note = 2'-O-Methyl-adenosine
  modified_base 53: mod_base = OTHER; note = 2'-O-Methyl-guanosine
  modified_base 54: mod_base = OTHER; note = 2'-O-Methyl-guanosine
  modified_base 57: mod_base = OTHER; note = 2'-O-Methyl-adenosine
  modified_base 61: mod_base = OTHER; note = 2'-O-Methyl-cytidine
  modified_base 66: mod_base = OTHER; note = 2'-O-Methyl-uridine
  modified_base 67: mod_base = OTHER; note = 2'-O-Methyl-cytidine
  modified_base 70: mod_base = OTHER; note = 2'-O-Methyl-cytidine
  modified_base 71: mod_base = OTHER; note = 2'-O-Methyl-uridine
  modified_base 72: mod_base = OTHER; note = 2'-O-Methyl-uridine
  modified_base 74: mod_base = OTHER; note = 2'-O-Methyl-adenosine
  modified_base 75: mod_base = OTHER; note = 2'-O-Methyl-adenosine
  modified_base 76: mod_base = OTHER; note = 2'-O-Methyl-adenosine
  modified_base 77: mod_base = OTHER; note = 2'-O-Methyl-adenosine
  modified_base 78: mod_base = OTHER; note = 2'-O-Methyl-adenosine
  modified_base 79: mod_base = OTHER; note = 2'-O-Methyl-guanosine
  modified_base 80: mod_base = OTHER; note = 2'-O-Methyl-uridine
  modified_base 82: mod_base = OTHER; note = 2'-O-Methyl-guanosine
  modified_base 83: mod_base = OTHER; note = 2'-O-Methyl-cytidine
  modified_base 84: mod_base = OTHER; note = 2'-O-Methyl-adenosine
  modified_base 85: mod_base = OTHER; note = 2'-O-Methyl-cytidine
  modified_base 86: mod_base = OTHER; note = 2'-O-Methyl-cytidine
  modified_base 87: mod_base = OTHER; note = 2'-O-Methyl-guanosine
  modified_base 89: mod_base = OTHER; note = 2'-O-Methyl-guanosine
  modified_base 92: mod_base = OTHER; note = 2'-O-Methyl-guanosine
  modified_base 93: mod_base = OTHER; note = 2'-O-Methyl-guanosine
  modified_base 94: mod_base = OTHER; note = 2'-O-Methyl-uridine
  modified_base 95: mod_base = OTHER; note = 2'-O-Methyl-guanosine
  modified_base 96: mod_base = OTHER; note = 2'-O-Methyl-cytidine
  modified_base 97: mod_base = OTHER; note = 2'-O-Methyl-uridine phosphorothioate
  modified_base 98: mod_base = OTHER; note = 2'-O-Methyl-uridine phosphorothioate
  modified_base 99: mod_base = OTHER; note = 2'-O-Methyl-uridine phosphorothioate
  modified_base 100: mod_base = OTHER; note = 2'-O-Methyl-uridine
  misc_difference 101: note = a, c, g, inosine, u, deoxyadenosine, deoxyguanosine, deoxycytidine, deoxyinosine, thymine, ribonebularine, 2'-O-methylnebularine, or 2'-deoxynebularine
  misc_difference 102: note = a, c, g, inosine, u, deoxyadenosine, deoxyguanosine, deoxycytidine, deoxyinosine, thymine, ribonebularine, 2'-O-methylnebularine, or 2'-deoxynebularine
  misc_difference 103: note = a, c, g, inosine, u, deoxyadenosine, deoxyguanosine, deoxycytidine, deoxyinosine, thymine, ribonebularine, 2'-O-methylnebularine, or 2'-deoxynebularine

SEQ ID NO: 2854 - RNA, 103 nt, synthetic construct; identical to SEQ ID NO: 1797
  source 1..103: mol_type = other RNA
  modified_base 1: mod_base = OTHER; note = 2'-O-Methyl-cytidine phosphorothioate
  modified_base 2: mod_base = OTHER; note = 2'-O-Methyl-adenosine phosphorothioate
  modified_base 3: mod_base = OTHER; note = 2'-O-Methyl-guanosine
  modified_base 21: mod_base = OTHER; note = 2'-O-Methyl-guanosine
  modified_base 28: mod_base = OTHER; note = 2'-O-Methyl-adenosine
  modified_base 29: mod_base = OTHER; note = 2'-O-Methyl-guanosine
  modified_base 30: mod_base = OTHER; note = 2'-O-Methyl-cytidine
  modified_base 31: mod_base = OTHER; note = 2'-O-Methyl-uridine
  modified_base 32: mod_base = OTHER; note = 2'-O-Methyl-adenosine
  modified_base 33: mod_base = OTHER; note = 2'-O-Methyl-guanosine
  modified_base 34: mod_base = OTHER; note = 2'-O-Methyl-adenosine
  modified_base 35: mod_base = OTHER; note = 2'-O-Methyl-adenosine
  modified_base 36: mod_base = OTHER; note = 2'-O-Methyl-adenosine
  modified_base 37: mod_base = OTHER; note = 2'-O-Methyl-uridine
  modified_base 38: mod_base = OTHER; note = 2'-O-Methyl-adenosine
  modified_base 39: mod_base = OTHER; note = 2'-O-Methyl-guanosine
  modified_base 40: mod_base = OTHER; note = 2'-O-Methyl-cytidine
  modified_base 41: mod_base = OTHER; note = 2'-O-Methyl-adenosine
  modified_base 42: mod_base = OTHER; note = 2'-O-Methyl-adenosine
  modified_base 46: mod_base = OTHER; note = 2'-O-Methyl-adenosine
  modified_base 48: mod_base = OTHER; note = 2'-O-Methyl-adenosine
  modified_base 50: mod_base = OTHER; note = 2'-O-Methyl-uridine
  modified_base 52: mod_base = OTHER; note = 2'-O-Methyl-adenosine
  modified_base 53: mod_base = OTHER; note = 2'-O-Methyl-guanosine
  modified_base 54: mod_base = OTHER; note = 2'-O-Methyl-guanosine
  modified_base 55: mod_base = OTHER; note = 2'-O-Methyl-cytidine
  modified_base 56: mod_base = OTHER; note = 2'-O-Methyl-uridine
  modified_base 57: mod_base = OTHER; note = 2'-O-Methyl-adenosine
  modified_base 60: mod_base = OTHER; note = 2'-O-Methyl-cytidine
  modified_base 61: mod_base = OTHER; note = 2'-O-Methyl-cytidine
  modified_base 66: mod_base = OTHER; note = 2'-O-Methyl-uridine
  modified_base 67: mod_base = OTHER; note = 2'-O-Methyl-cytidine
  modified_base 70: mod_base = OTHER; note = 2'-O-Methyl-cytidine
  modified_base 71: mod_base = OTHER; note = 2'-O-Methyl-uridine
  modified_base 72: mod_base = OTHER; note = 2'-O-Methyl-uridine
  modified_base 74: mod_base = OTHER; note = 2'-O-Methyl-adenosine
  modified_base 75: mod_base = OTHER; note = 2'-O-Methyl-adenosine
  modified_base 76: mod_base = OTHER; note = 2'-O-Methyl-adenosine
  modified_base 77: mod_base = OTHER; note = 2'-O-Methyl-adenosine
  modified_base 78: mod_base = OTHER; note = 2'-O-Methyl-adenosine
  modified_base 79: mod_base = OTHER; note = 2'-O-Methyl-guanosine
  modified_base 80: mod_base = OTHER; note = 2'-O-Methyl-uridine
  modified_base 82: mod_base = OTHER; note = 2'-O-Methyl-guanosine
  modified_base 83: mod_base = OTHER; note = 2'-O-Methyl-cytidine
  modified_base 84: mod_base = OTHER; note = 2'-O-Methyl-adenosine
  modified_base 85: mod_base = OTHER; note = 2'-O-Methyl-cytidine
  modified_base 86: mod_base = OTHER; note = 2'-O-Methyl-cytidine
  modified_base 87: mod_base = OTHER; note = 2'-O-Methyl-guanosine
  modified_base 89: mod_base = OTHER; note = 2'-O-Methyl-guanosine
  modified_base 92: mod_base = OTHER; note = 2'-O-Methyl-guanosine
  modified_base 93: mod_base = OTHER; note = 2'-O-Methyl-guanosine
  modified_base 94: mod_base = OTHER; note = 2'-O-Methyl-uridine
  modified_base 95: mod_base = OTHER; note = 2'-O-Methyl-guanosine
  modified_base 96: mod_base = OTHER; note = 2'-O-Methyl-cytidine
  modified_base 97: mod_base = OTHER; note = 2'-O-Methyl-uridine phosphorothioate
  modified_base 98: mod_base = OTHER; note = 2'-O-Methyl-uridine phosphorothioate
  modified_base 99: mod_base = OTHER; note = 2'-O-Methyl-uridine phosphorothioate
  modified_base 100: mod_base = OTHER; note = 2'-O-Methyl-uridine
  misc_difference 101: note = a, c, g, inosine, u, deoxyadenosine, deoxyguanosine, deoxycytidine, deoxyinosine, thymine, ribonebularine, 2'-O-methylnebularine, or 2'-deoxynebularine
  misc_difference 102: note = a, c, g, inosine, u, deoxyadenosine, deoxyguanosine, deoxycytidine, deoxyinosine, thymine, ribonebularine, 2'-O-methylnebularine, or 2'-deoxynebularine
  misc_difference 103: note = a, c, g, inosine, u, deoxyadenosine, deoxyguanosine, deoxycytidine, deoxyinosine, thymine, ribonebularine, 2'-O-methylnebularine, or 2'-deoxynebularine

SEQ ID NO: 2855 - RNA, 103 nt, synthetic construct; identical to SEQ ID NO: 1797
  source 1..103: mol_type = other RNA
  modified_base 1: mod_base = OTHER; note = 2'-O-Methyl-cytidine phosphorothioate
  modified_base 2: mod_base = OTHER; note = 2'-O-Methyl-adenosine phosphorothioate
  modified_base 3: mod_base = OTHER; note = 2'-O-Methyl-guanosine
  modified_base 21: mod_base = OTHER; note = 2'-O-Methyl-guanosine
  modified_base 28: mod_base = OTHER; note = 2'-O-Methyl-adenosine
  modified_base 29: mod_base = OTHER; note = 2'-O-Methyl-guanosine
  modified_base 30: mod_base = OTHER; note = 2'-O-Methyl-cytidine
  modified_base 31: mod_base = OTHER; note = 2'-O-Methyl-uridine
  modified_base 32: mod_base = OTHER; note = 2'-O-Methyl-adenosine
  modified_base 33: mod_base = OTHER; note = 2'-O-Methyl-guanosine
  modified_base 34: mod_base = OTHER; note = 2'-O-Methyl-adenosine
  modified_base 35: mod_base = OTHER; note = 2'-O-Methyl-adenosine
  modified_base 36: mod_base = OTHER; note = 2'-O-Methyl-adenosine
  modified_base 37: mod_base = OTHER; note = 2'-O-Methyl-uridine
  modified_base 38: mod_base = OTHER; note = 2'-O-Methyl-adenosine
  modified_base 39: mod_base = OTHER; note = 2'-O-Methyl-guanosine
  modified_base 40: mod_base = OTHER; note = 2'-O-Methyl-cytidine
  modified_base 41: mod_base = OTHER; note = 2'-O-Methyl-adenosine
  modified_base 42: mod_base = OTHER; note = 2'-O-Methyl-adenosine
  modified_base 46: mod_base = OTHER; note = 2'-O-Methyl-adenosine
  modified_base 48: mod_base = OTHER; note = 2'-O-Methyl-adenosine
  modified_base 50: mod_base = OTHER; note = 2'-O-Methyl-uridine
  modified_base 52: mod_base = OTHER; note = 2'-O-Methyl-adenosine
  modified_base 53: mod_base = OTHER; note = 2'-O-Methyl-guanosine
  modified_base 54: mod_base = OTHER; note = 2'-O-Methyl-guanosine
  modified_base 57: mod_base = OTHER; note = 2'-O-Methyl-adenosine
  modified_base 61: mod_base = OTHER; note = 2'-O-Methyl-cytidine
  modified_base 66: mod_base = OTHER; note = 2'-O-Methyl-uridine
  modified_base 67: mod_base = OTHER; note = 2'-O-Methyl-cytidine
  modified_base 70: mod_base = OTHER; note = 2'-O-Methyl-cytidine
  modified_base 71: mod_base = OTHER; note = 2'-O-Methyl-uridine
  modified_base 72: mod_base = OTHER; note = 2'-O-Methyl-uridine
  modified_base 73: mod_base = OTHER; note = 2'-O-Methyl-guanosine
  modified_base 74: mod_base = OTHER; note = 2'-O-Methyl-adenosine
  modified_base 75: mod_base = OTHER; note = 2'-O-Methyl-adenosine
  modified_base 76: mod_base = OTHER; note = 2'-O-Methyl-adenosine
  modified_base 77: mod_base = OTHER; note = 2'-O-Methyl-adenosine
  modified_base 78: mod_base = OTHER; note = 2'-O-Methyl-adenosine
  modified_base 79: mod_base = OTHER; note = 2'-O-Methyl-guanosine
  modified_base 80: mod_base = OTHER; note = 2'-O-Methyl-uridine
  modified_base 82: mod_base = OTHER; note = 2'-O-Methyl-guanosine
  modified_base 83: mod_base = OTHER; note = 2'-O-Methyl-cytidine
  modified_base 84: mod_base = OTHER; note = 2'-O-Methyl-adenosine
  modified_base 85: mod_base = OTHER; note = 2'-O-Methyl-cytidine
  modified_base 86: mod_base = OTHER; note = 2'-O-Methyl-cytidine
  modified_base 87: mod_base = OTHER; note = 2'-O-Methyl-guanosine
  modified_base 89: mod_base = OTHER; note = 2'-O-Methyl-guanosine
  modified_base 92: mod_base = OTHER; note = 2'-O-Methyl-guanosine
  modified_base 93: mod_base = OTHER; note = 2'-O-Methyl-guanosine
  modified_base 94: mod_base = OTHER; note = 2'-O-Methyl-uridine
  modified_base 95: mod_base = OTHER; note = 2'-O-Methyl-guanosine
  modified_base 96: mod_base = OTHER; note = 2'-O-Methyl-cytidine
  modified_base 97: mod_base = OTHER; note = 2'-O-Methyl-uridine phosphorothioate
  modified_base 98: mod_base = OTHER; note = 2'-O-Methyl-uridine phosphorothioate
  modified_base 99: mod_base = OTHER; note = 2'-O-Methyl-uridine phosphorothioate
  modified_base 100: mod_base = OTHER; note = 2'-O-Methyl-uridine
  misc_difference 101: note = a, c, g, inosine, u, deoxyadenosine, deoxyguanosine, deoxycytidine, deoxyinosine, thymine, ribonebularine, 2'-O-methylnebularine, or 2'-deoxynebularine
  misc_difference 102: note = a, c, g, inosine, u, deoxyadenosine, deoxyguanosine, deoxycytidine, deoxyinosine, thymine, ribonebularine, 2'-O-methylnebularine, or 2'-deoxynebularine
  misc_difference 103: note = a, c, g, inosine, u, deoxyadenosine, deoxyguanosine, deoxycytidine, deoxyinosine, thymine, ribonebularine, 2'-O-methylnebularine, or 2'-deoxynebularine

SEQ ID NO: 2856 - RNA, 103 nt, synthetic construct; identical to SEQ ID NO: 1797
  source 1..103: mol_type = other RNA
  modified_base 1: mod_base = OTHER; note = 2'-O-Methyl-cytidine phosphorothioate
  modified_base 2: mod_base = OTHER; note = 2'-O-Methyl-adenosine phosphorothioate
  modified_base 3: mod_base = OTHER; note = 2'-O-Methyl-guanosine
  modified_base 21: mod_base = OTHER; note = 2'-O-Methyl-guanosine
  modified_base 28: mod_base = OTHER; note = 2'-O-Methyl-adenosine
  modified_base 29: mod_base = OTHER; note = 2'-O-Methyl-guanosine
  modified_base 30: mod_base = OTHER; note = 2'-O-Methyl-cytidine
  modified_base 31: mod_base = OTHER; note = 2'-O-Methyl-uridine
  modified_base 32: mod_base = OTHER; note = 2'-O-Methyl-adenosine
  modified_base 33: mod_base = OTHER; note = 2'-O-Methyl-guanosine
  modified_base 34: mod_base = OTHER; note = 2'-O-Methyl-adenosine
  modified_base 35: mod_base = OTHER; note = 2'-O-Methyl-adenosine
  modified_base 36: mod_base = OTHER; note = 2'-O-Methyl-adenosine
  modified_base 37: mod_base = OTHER; note = 2'-O-Methyl-uridine
  modified_base 38: mod_base = OTHER; note = 2'-O-Methyl-adenosine
  modified_base 39: mod_base = OTHER; note = 2'-O-Methyl-guanosine
  modified_base 40: mod_base = OTHER; note = 2'-O-Methyl-cytidine
  modified_base 41: mod_base = OTHER; note = 2'-O-Methyl-adenosine
  modified_base 42: mod_base = OTHER; note = 2'-O-Methyl-adenosine
  modified_base 46: mod_base = OTHER; note = 2'-O-Methyl-adenosine
  modified_base 48: mod_base = OTHER; note = 2'-O-Methyl-adenosine
  modified_base 50: mod_base = OTHER; note = 2'-O-Methyl-uridine
  modified_base 52: mod_base = OTHER; note = 2'-O-Methyl-adenosine
  modified_base 53: mod_base = OTHER; note = 2'-O-Methyl-guanosine
  modified_base 54: mod_base = OTHER; note = 2'-O-Methyl-guanosine
  modified_base 57: mod_base = OTHER; note = 2'-O-Methyl-adenosine
  modified_base 61: mod_base = OTHER; note = 2'-O-Methyl-cytidine
  modified_base 66: mod_base = OTHER; note = 2'-O-Methyl-uridine
  modified_base 67: mod_base = OTHER; note = 2'-O-Methyl-cytidine
  modified_base 70: mod_base = OTHER; note = 2'-O-Methyl-cytidine
  modified_base 71: mod_base = OTHER; note = 2'-O-Methyl-uridine
  modified_base 72: mod_base = OTHER; note = 2'-O-Methyl-uridine
  modified_base 73: mod_base = OTHER; note = 2'-O-Methyl-guanosine
  modified_base 74: mod_base = OTHER; note = 2'-O-Methyl-adenosine
  modified_base 75: mod_base = OTHER; note = 2'-O-Methyl-adenosine
  modified_base 76: mod_base = OTHER; note = 2'-O-Methyl-adenosine
  modified_base 77: mod_base = OTHER; note = 2'-O-Methyl-adenosine
  modified_base 78: mod_base = OTHER; note = 2'-O-Methyl-adenosine
  modified_base 79: mod_base = OTHER; note = 2'-O-Methyl-guanosine
  modified_base 80: mod_base = OTHER; note = 2'-O-Methyl-uridine
  modified_base 82: mod_base = OTHER; note = 2'-O-Methyl-guanosine
  modified_base 83: mod_base = OTHER; note = 2'-O-Methyl-cytidine
  modified_base 84: mod_base = OTHER; note = 2'-O-Methyl-adenosine
  modified_base 85: mod_base = OTHER; note = 2'-O-Methyl-cytidine
  modified_base 86: mod_base = OTHER; note = 2'-O-Methyl-cytidine
  modified_base 87: mod_base = OTHER; note = 2'-O-Methyl-guanosine
  modified_base 89: mod_base = OTHER; note = 2'-O-Methyl-guanosine
  modified_base 91: mod_base = OTHER; note = 2'-O-Methyl-cytidine
  modified_base 92: mod_base = OTHER; note = 2'-O-Methyl-guanosine
  modified_base 93: mod_base = OTHER; note = 2'-O-Methyl-guanosine
  modified_base 94: mod_base = OTHER; note = 2'-O-Methyl-uridine
  modified_base 95: mod_base = OTHER; note = 2'-O-Methyl-guanosine
  modified_base 96: mod_base = OTHER; note = 2'-O-Methyl-cytidine
  modified_base 97: mod_base = OTHER; note = 2'-O-Methyl-uridine phosphorothioate
  modified_base 98: mod_base = OTHER; note = 2'-O-Methyl-uridine phosphorothioate
  modified_base 99: mod_base = OTHER; note = 2'-O-Methyl-uridine phosphorothioate
  modified_base 100: mod_base = OTHER; note = 2'-O-Methyl-uridine
  misc_difference 101: note = a, c, g, inosine, u, deoxyadenosine, deoxyguanosine, deoxycytidine, deoxyinosine, thymine, ribonebularine, 2'-O-methylnebularine, or 2'-deoxynebularine
  misc_difference 102: note = a, c, g, inosine, u, deoxyadenosine, deoxyguanosine, deoxycytidine, deoxyinosine, thymine, ribonebularine, 2'-O-methylnebularine, or 2'-deoxynebularine
  misc_difference 103: note = a, c, g, inosine, u, deoxyadenosine, deoxyguanosine, deoxycytidine, deoxyinosine, thymine, ribonebularine, 2'-O-methylnebularine, or 2'-deoxynebularine

SEQ ID NO: 2857 - RNA, 103 nt, synthetic construct; identical to SEQ ID NO: 1797
  source 1..103: mol_type = other RNA
  modified_base 1: mod_base = OTHER; note = 2'-O-Methyl-cytidine phosphorothioate
  modified_base 2: mod_base = OTHER; note = 2'-O-Methyl-adenosine phosphorothioate
  modified_base 3: mod_base = OTHER; note = 2'-O-Methyl-guanosine
  modified_base 21: mod_base = OTHER; note = 2'-O-Methyl-guanosine
  modified_base 28: mod_base = OTHER; note = 2'-O-Methyl-adenosine
  modified_base 29: mod_base = OTHER; note = 2'-O-Methyl-guanosine
  modified_base 30: mod_base = OTHER; note = 2'-O-Methyl-cytidine
  modified_base 31: mod_base = OTHER; note = 2'-O-Methyl-uridine
  modified_base 32: mod_base = OTHER; note = 2'-O-Methyl-adenosine
  modified_base 34: mod_base = OTHER; note = 2'-O-Methyl-adenosine
  modified_base 35: mod_base = OTHER; note = 2'-O-Methyl-adenosine
  modified_base 36: mod_base = OTHER; note = 2'-O-Methyl-adenosine
  modified_base 37: mod_base = OTHER; note = 2'-O-Methyl-uridine
  modified_base 38: mod_base = OTHER; note = 2'-O-Methyl-adenosine
  modified_base 39: mod_base = OTHER; note = 2'-O-Methyl-guanosine
  modified_base 40: mod_base = OTHER; note = 2'-O-Methyl-cytidine
  modified_base 41: mod_base = OTHER; note = 2'-O-Methyl-adenosine
  modified_base 42: mod_base = OTHER; note = 2'-O-Methyl-adenosine
  modified_base 46: mod_base = OTHER; note = 2'-O-Methyl-adenosine
  modified_base 48: mod_base = OTHER; note = 2'-O-Methyl-adenosine
  modified_base 50: mod_base = OTHER; note = 2'-O-Methyl-uridine
  modified_base 52: mod_base = OTHER; note = 2'-O-Methyl-adenosine
  modified_base 53: mod_base = OTHER; note = 2'-O-Methyl-guanosine
  modified_base 54: mod_base = OTHER; note = 2'-O-Methyl-guanosine
  modified_base 57: mod_base = OTHER; note = 2'-O-Methyl-adenosine
  modified_base 61: mod_base = OTHER; note = 2'-O-Methyl-cytidine
  modified_base 66: mod_base = OTHER; note = 2'-O-Methyl-uridine
  modified_base 67: mod_base = OTHER; note = 2'-O-Methyl-cytidine
  modified_base 70: mod_base = OTHER; note = 2'-O-Methyl-cytidine
  modified_base 71: mod_base = OTHER; note = 2'-O-Methyl-uridine
  modified_base 72: mod_base = OTHER; note = 2'-O-Methyl-uridine
  modified_base 73: mod_base = OTHER; note = 2'-O-Methyl-guanosine
  modified_base 74: mod_base = OTHER; note = 2'-O-Methyl-adenosine
  modified_base 75: mod_base = OTHER; note = 2'-O-Methyl-adenosine
  modified_base 76: mod_base = OTHER; note = 2'-O-Methyl-adenosine
  modified_base 77: mod_base = OTHER; note = 2'-O-Methyl-adenosine
  modified_base 78: mod_base = OTHER; note = 2'-O-Methyl-adenosine
  modified_base 79: mod_base = OTHER; note = 2'-O-Methyl-guanosine
  modified_base 80: mod_base = OTHER; note = 2'-O-Methyl-uridine
  modified_base 82: mod_base = OTHER; note = 2'-O-Methyl-guanosine
  modified_base 83: mod_base = OTHER; note = 2'-O-Methyl-cytidine
  modified_base 84: mod_base = OTHER; note = 2'-O-Methyl-adenosine
  modified_base 85: mod_base = OTHER; note = 2'-O-Methyl-cytidine
  modified_base 86: mod_base = OTHER; note = 2'-O-Methyl-cytidine
  modified_base 87: mod_base = OTHER; note = 2'-O-Methyl-guanosine
  modified_base 89: mod_base = OTHER; note = 2'-O-Methyl-guanosine
  modified_base 92: mod_base = OTHER; note = 2'-O-Methyl-guanosine
  modified_base 93: mod_base = OTHER; note = 2'-O-Methyl-guanosine
  modified_base 94: mod_base = OTHER; note = 2'-O-Methyl-uridine
  modified_base 95: mod_base = OTHER; note = 2'-O-Methyl-guanosine
  modified_base 96: mod_base = OTHER; note = 2'-O-Methyl-cytidine
  modified_base 97: mod_base = OTHER; note = 2'-O-Methyl-uridine phosphorothioate
  modified_base 98: mod_base = OTHER; note = 2'-O-Methyl-uridine phosphorothioate
  modified_base 99: mod_base = OTHER; note = 2'-O-Methyl-uridine phosphorothioate
  modified_base 100: mod_base = OTHER; note = 2'-O-Methyl-uridine
  misc_difference 101: note = a, c, g, inosine, u, deoxyadenosine, deoxyguanosine, deoxycytidine, deoxyinosine, thymine, ribonebularine, 2'-O-methylnebularine, or 2'-deoxynebularine
  misc_difference 102: note = a, c, g, inosine, u, deoxyadenosine, deoxyguanosine, deoxycytidine, deoxyinosine, thymine, ribonebularine, 2'-O-methylnebularine, or 2'-deoxynebularine
  misc_difference 103: note = a, c, g, inosine, u, deoxyadenosine, deoxyguanosine, deoxycytidine, deoxyinosine, thymine, ribonebularine, 2'-O-methylnebularine, or 2'-deoxynebularine

SEQ ID NO: 2858 - RNA, 103 nt, synthetic construct; identical to SEQ ID NO: 1797
  source 1..103: mol_type = other RNA
  modified_base 1: mod_base = OTHER; note = 2'-O-Methyl-cytidine phosphorothioate
  modified_base 2: mod_base = OTHER; note = 2'-O-Methyl-adenosine phosphorothioate
  modified_base 3: mod_base = OTHER; note = 2'-O-Methyl-guanosine
  modified_base 21: mod_base = OTHER; note = 2'-O-Methyl-guanosine
  modified_base 28: mod_base = OTHER; note = 2'-O-Methyl-adenosine
  modified_base 29: mod_base = OTHER; note = 2'-O-Methyl-guanosine
  modified_base 30: mod_base = OTHER; note = 2'-O-Methyl-cytidine
  modified_base 31: mod_base = OTHER; note = 2'-O-Methyl-uridine
  modified_base 32: mod_base = OTHER; note = 2'-O-Methyl-adenosine
  modified_base 34: mod_base = OTHER; note = 2'-O-Methyl-adenosine
  modified_base 35: mod_base = OTHER; note = 2'-O-Methyl-adenosine
  modified_base 36: mod_base = OTHER; note = 2'-O-Methyl-adenosine
  modified_base 37: mod_base = OTHER; note = 2'-O-Methyl-uridine
  modified_base 38: mod_base = OTHER; note = 2'-O-Methyl-adenosine
  modified_base 39: mod_base = OTHER; note = 2'-O-Methyl-guanosine
  modified_base 40: mod_base = OTHER; note = 2'-O-Methyl-cytidine
  modified_base 41: mod_base = OTHER; note = 2'-O-Methyl-adenosine
  modified_base 42: mod_base = OTHER; note = 2'-O-Methyl-adenosine
  modified_base 46: mod_base = OTHER; note = 2'-O-Methyl-adenosine
  modified_base 48: mod_base = OTHER; note = 2'-O-Methyl-adenosine
  modified_base 50: mod_base = OTHER; note = 2'-O-Methyl-uridine
  modified_base 52: mod_base = OTHER; note = 2'-O-Methyl-adenosine
  modified_base 53: mod_base = OTHER; note = 2'-O-Methyl-guanosine
  modified_base 54: mod_base = OTHER; note = 2'-O-Methyl-guanosine
  modified_base 57: mod_base = OTHER; note = 2'-O-Methyl-adenosine
  modified_base 61: mod_base = OTHER; note = 2'-O-Methyl-cytidine
  modified_base 66: mod_base = OTHER; note = 2'-O-Methyl-uridine
  modified_base 67: mod_base = OTHER; note = 2'-O-Methyl-cytidine
  modified_base 70: mod_base = OTHER; note = 2'-O-Methyl-cytidine
  modified_base 71: mod_base = OTHER; note = 2'-O-Methyl-uridine
  modified_base 72: mod_base = OTHER; note = 2'-O-Methyl-uridine
  modified_base 73: mod_base = OTHER; note = 2'-O-Methyl-guanosine
  modified_base 74: mod_base = OTHER; note = 2'-O-Methyl-adenosine
  modified_base 75: mod_base = OTHER; note = 2'-O-Methyl-adenosine
  modified_base 76: mod_base = OTHER; note = 2'-O-Methyl-adenosine
  modified_base 77: mod_base = OTHER; note = 2'-O-Methyl-adenosine
  modified_base 78: mod_base = OTHER; note = 2'-O-Methyl-adenosine
  modified_base 79: mod_base = OTHER; note = 2'-O-Methyl-guanosine
  modified_base 80: mod_base = OTHER; note = 2'-O-Methyl-uridine
  modified_base 82: mod_base = OTHER; note = 2'-O-Methyl-guanosine
  modified_base 83: mod_base = OTHER; note = 2'-O-Methyl-cytidine
  modified_base 84: mod_base = OTHER; note = 2'-O-Methyl-adenosine
  modified_base 85: mod_base = OTHER; note = 2'-O-Methyl-cytidine
  modified_base 86: mod_base = OTHER; note = 2'-O-Methyl-cytidine
  modified_base 87: mod_base = OTHER; note = 2'-O-Methyl-guanosine
  modified_base 89: mod_base = OTHER; note = 2'-O-Methyl-guanosine
  modified_base 91: mod_base = OTHER; note = 2'-O-Methyl-cytidine
  modified_base 92: mod_base = OTHER; note = 2'-O-Methyl-guanosine
  modified_base 93: mod_base = OTHER; note = 2'-O-Methyl-guanosine
  modified_base 94: mod_base = OTHER; note = 2'-O-Methyl-uridine
  modified_base 95: mod_base = OTHER; note = 2'-O-Methyl-guanosine
  modified_base 96: mod_base = OTHER; note = 2'-O-Methyl-cytidine
  modified_base 97: mod_base = OTHER; note = 2'-O-Methyl-uridine phosphorothioate
  modified_base 98: mod_base = OTHER; note = 2'-O-Methyl-uridine phosphorothioate
  modified_base 99: mod_base = OTHER; note = 2'-O-Methyl-uridine phosphorothioate
  modified_base 100: mod_base = OTHER; note = 2'-O-Methyl-uridine
  misc_difference 101: note = a, c, g, inosine, u, deoxyadenosine, deoxyguanosine, deoxycytidine, deoxyinosine, thymine, ribonebularine, 2'-O-methylnebularine, or 2'-deoxynebularine
  misc_difference 102: note = a, c, g, inosine, u, deoxyadenosine, deoxyguanosine, deoxycytidine, deoxyinosine, thymine, ribonebularine, 2'-O-methylnebularine, or 2'-deoxynebularine
  misc_difference 103: note = a, c, g, inosine, u, deoxyadenosine, deoxyguanosine, deoxycytidine, deoxyinosine, thymine, ribonebularine, 2'-O-methylnebularine, or 2'-deoxynebularine

SEQ ID NO: 2859 - RNA, 103 nt, synthetic construct; identical to SEQ ID NO: 1797
  source 1..103: mol_type = other RNA
  modified_base 1: mod_base = OTHER; note = 2'-O-Methyl-cytidine phosphorothioate
  modified_base 2: mod_base = OTHER; note = 2'-O-Methyl-adenosine phosphorothioate
  modified_base 3: mod_base = OTHER; note = 2'-O-Methyl-guanosine
  modified_base 21: mod_base = OTHER; note = 2'-O-Methyl-guanosine
  modified_base 28: mod_base = OTHER; note = 2'-O-Methyl-adenosine
  modified_base 29: mod_base = OTHER; note = 2'-O-Methyl-guanosine
  modified_base 30: mod_base = OTHER; note = 2'-O-Methyl-cytidine
  modified_base 31: mod_base = OTHER; note = 2'-O-Methyl-uridine
  modified_base 32: mod_base = OTHER; note = 2'-O-Methyl-adenosine
  modified_base 34: mod_base = OTHER; note = 2'-O-Methyl-adenosine
  modified_base 35: mod_base = OTHER; note = 2'-O-Methyl-adenosine
  modified_base 36: mod_base = OTHER; note = 2'-O-Methyl-adenosine
  modified_base 37: mod_base = OTHER; note = 2'-O-Methyl-uridine
  modified_base 38: mod_base = OTHER; note = 2'-O-Methyl-adenosine
  modified_base 39: mod_base = OTHER; note = 2'-O-Methyl-guanosine
  modified_base 40: mod_base = OTHER; note = 2'-O-Methyl-cytidine
  modified_base 41: mod_base = OTHER; note = 2'-O-Methyl-adenosine
  modified_base 42: mod_base = OTHER; note = 2'-O-Methyl-adenosine
  modified_base 46: mod_base = OTHER; note = 2'-O-Methyl-adenosine
  modified_base 48: mod_base = OTHER; note = 2'-O-Methyl-adenosine
  modified_base 50: mod_base = OTHER; note = 2'-O-Methyl-uridine
  modified_base 52: mod_base = OTHER; note = 2'-O-Methyl-adenosine
  modified_base 53: mod_base = OTHER; note = 2'-O-Methyl-guanosine
  modified_base 54: mod_base = OTHER; note = 2'-O-Methyl-guanosine
  modified_base 55: mod_base = OTHER; note = 2'-O-Methyl-cytidine
  modified_base 56: mod_base = OTHER; note = 2'-O-Methyl-uridine
  modified_base 57: mod_base = OTHER; note = 2'-O-Methyl-adenosine
  modified_base 60: mod_base = OTHER; note = 2'-O-Methyl-cytidine
  modified_base 61: mod_base = OTHER; note = 2'-O-Methyl-cytidine
  modified_base 66: mod_base = OTHER; note = 2'-O-Methyl-uridine
  modified_base 67: mod_base = OTHER; note = 2'-O-Methyl-cytidine
  modified_base 70: mod_base = OTHER; note = 2'-O-Methyl-cytidine
  modified_base 71: mod_base = OTHER; note = 2'-O-Methyl-uridine
  modified_base 72: mod_base = OTHER; note = 2'-O-Methyl-uridine
  modified_base 74: mod_base = OTHER; note = 2'-O-Methyl-adenosine
  modified_base 75: mod_base = OTHER; note = 2'-O-Methyl-adenosine
  modified_base 76: mod_base = OTHER; note = 2'-O-Methyl-adenosine
  modified_base 77: mod_base = OTHER; note = 2'-O-Methyl-adenosine
  modified_base 78: mod_base = OTHER; note = 2'-O-Methyl-adenosine
  modified_base 79: mod_base = OTHER; note = 2'-O-Methyl-guanosine
  modified_base 80: mod_base = OTHER; note = 2'-O-Methyl-uridine
  modified_base 82: mod_base = OTHER; note = 2'-O-Methyl-guanosine
  modified_base 83: mod_base = OTHER; note = 2'-O-Methyl-cytidine
  modified_base 84: mod_base = OTHER; note = 2'-O-Methyl-adenosine
  modified_base 85: mod_base = OTHER; note = 2'-O-Methyl-cytidine
  modified_base 86: mod_base = OTHER; note = 2'-O-Methyl-cytidine
  modified_base 87: mod_base = OTHER; note = 2'-O-Methyl-guanosine
  modified_base 89: mod_base = OTHER; note = 2'-O-Methyl-guanosine
  modified_base 92: mod_base = OTHER; note = 2'-O-Methyl-guanosine
  modified_base 93: mod_base = OTHER; note = 2'-O-Methyl-guanosine
  modified_base 94: mod_base = OTHER; note = 2'-O-Methyl-uridine
  modified_base 95: mod_base = OTHER; note = 2'-O-Methyl-guanosine
  modified_base 96: mod_base = OTHER; note = 2'-O-Methyl-cytidine
  modified_base 97: mod_base = OTHER; note = 2'-O-Methyl-uridine phosphorothioate
  modified_base 98: mod_base = OTHER; note = 2'-O-Methyl-uridine phosphorothioate
  modified_base 99: mod_base = OTHER; note = 2'-O-Methyl-uridine phosphorothioate
  modified_base 100: mod_base = OTHER; note = 2'-O-Methyl-uridine
  misc_difference 101: note = a, c, g, inosine, u, deoxyadenosine, deoxyguanosine, deoxycytidine, deoxyinosine, thymine, ribonebularine, 2'-O-methylnebularine, or 2'-deoxynebularine
  misc_difference 102: note = a, c, g, inosine, u, deoxyadenosine, deoxyguanosine, deoxycytidine, deoxyinosine, thymine, ribonebularine, 2'-O-methylnebularine, or 2'-deoxynebularine
  misc_difference 103: note = a, c, g, inosine, u, deoxyadenosine, deoxyguanosine, deoxycytidine, deoxyinosine, thymine, ribonebularine, 2'-O-methylnebularine, or 2'-deoxynebularine

SEQ ID NO: 2860 - RNA, 103 nt, synthetic construct; identical to SEQ ID NO: 1795
  source 1..103: mol_type = other RNA
  modified_base 1: mod_base = OTHER; note = 2'-O-Methyl-cytidine phosphorothioate
  modified_base 2: mod_base = OTHER; note = 2'-O-Methyl-cytidine phosphorothioate
  modified_base 3: mod_base = OTHER; note = 2'-O-Methyl-cytidine
  modified_base 21: mod_base = OTHER; note = 2'-O-Methyl-guanosine
  modified_base 28: mod_base = OTHER; note = 2'-O-Methyl-adenosine
  modified_base 29: mod_base = OTHER; note = 2'-O-Methyl-guanosine
  modified_base 30: mod_base = OTHER; note = 2'-O-Methyl-cytidine
  modified_base 31: mod_base = OTHER; note = 2'-O-Methyl-uridine
  modified_base 32: mod_base = OTHER; note = 2'-O-Methyl-adenosine
  modified_base 33: mod_base = OTHER; note = 2'-O-Methyl-guanosine
  modified_base 34: mod_base = OTHER; note = 2'-O-Methyl-adenosine
  modified_base 35: mod_base = OTHER; note = 2'-O-Methyl-adenosine
  modified_base 36: mod_base = OTHER; note = 2'-O-Methyl-adenosine
  modified_base 37: mod_base = OTHER; note = 2'-O-Methyl-uridine
  modified_base 38: mod_base = OTHER; note = 2'-O-Methyl-adenosine
  modified_base 39: mod_base = OTHER; note = 2'-O-Methyl-guanosine
  modified_base 40: mod_base = OTHER; note = 2'-O-Methyl-cytidine
  modified_base 41: mod_base = OTHER; note = 2'-O-Methyl-adenosine
  modified_base 42: mod_base = OTHER; note = 2'-O-Methyl-adenosine
  modified_base 46: mod_base = OTHER; note = 2'-O-Methyl-adenosine
  modified_base 48: mod_base = OTHER; note = 2'-O-Methyl-adenosine
  modified_base 50: mod_base = OTHER; note = 2'-O-Methyl-uridine
  modified_base 52: mod_base = OTHER; note = 2'-O-Methyl-adenosine
  modified_base 53: mod_base = OTHER; note = 2'-O-Methyl-guanosine
  modified_base 54: mod_base = OTHER; note = 2'-O-Methyl-guanosine
  modified_base 55: mod_base = OTHER; note = 2'-O-Methyl-cytidine
  modified_base 56: mod_base = OTHER; note = 2'-O-Methyl-uridine
  modified_base 57: mod_base = OTHER; note = 2'-O-Methyl-adenosine
  modified_base 60: mod_base = OTHER; note = 2'-O-Methyl-cytidine
  modified_base 61: mod_base = OTHER; note = 2'-O-Methyl-cytidine
  modified_base 64: mod_base = OTHER; note = uridine phosphorothioate
  modified_base 66: mod_base = OTHER; note = 2'-O-Methyl-uridine
  modified_base 67: mod_base = OTHER; note = 2'-O-Methyl-cytidine
  modified_base 70: mod_base = OTHER; note = 2'-O-Methyl-cytidine
  modified_base 71: mod_base = OTHER; note = 2'-O-Methyl-uridine
  modified_base 72: mod_base = OTHER; note = 2'-O-Methyl-uridine
  modified_base 73: mod_base = OTHER; note = 2'-O-Methyl-guanosine
  modified_base 74: mod_base = OTHER; note = 2'-O-Methyl-adenosine
  modified_base 75: mod_base = OTHER; note = 2'-O-Methyl-adenosine
  modified_base 76: mod_base = OTHER; note = 2'-O-Methyl-adenosine
  modified_base 77: mod_base = OTHER; note = 2'-O-Methyl-adenosine
  modified_base 78: mod_base = OTHER; note = 2'-O-Methyl-adenosine
  modified_base 79: mod_base = OTHER; note = 2'-O-Methyl-guanosine
  modified_base 80: mod_base = OTHER; note = 2'-O-Methyl-uridine
  modified_base 81: mod_base = OTHER; note = 2'-O-Methyl-guanosine
  modified_base 83: mod_base = OTHER; note = 2'-O-Methyl-cytidine
  modified_base 84: mod_base = OTHER; note = 2'-O-Methyl-adenosine
  modified_base 85: mod_base = OTHER; note = 2'-O-Methyl-cytidine
  modified_base 86: mod_base = OTHER; note = 2'-O-Methyl-cytidine
  modified_base 87: mod_base = OTHER; note = 2'-O-Methyl-guanosine
  modified_base 88: mod_base = OTHER; note = 2'-O-Methyl-adenosine
  modified_base 89: mod_base = OTHER; note = 2'-O-Methyl-guanosine
  modified_base 90: mod_base = OTHER; note = 2'-O-Methyl-uridine
  modified_base 91: mod_base = OTHER; note = 2'-O-Methyl-cytidine
  modified_base 92: mod_base = OTHER; note = 2'-O-Methyl-guanosine
  modified_base 93: mod_base = OTHER; note = 2'-O-Methyl-guanosine
  modified_base 94: mod_base = OTHER; note = 2'-O-Methyl-uridine
  modified_base 95: mod_base = OTHER; note = 2'-O-Methyl-guanosine
  modified_base 96: mod_base = OTHER; note = 2'-O-Methyl-cytidine
  modified_base 97: mod_base = OTHER; note = 2'-O-Methyl-uridine phosphorothioate
  modified_base 98: mod_base = OTHER; note = 2'-O-Methyl-uridine phosphorothioate
  modified_base 99: mod_base = OTHER; note = 2'-O-Methyl-uridine phosphorothioate
  modified_base 100: mod_base = OTHER; note = 2'-O-Methyl-uridine
  misc_difference 101: note = a, c, g, inosine, u, deoxyadenosine, deoxyguanosine, deoxycytidine, deoxyinosine, thymine, ribonebularine, 2'-O-methylnebularine, or 2'-deoxynebularine
  misc_difference 102: note = a, c, g, inosine, u, deoxyadenosine, deoxyguanosine, deoxycytidine, deoxyinosine, thymine, ribonebularine, 2'-O-methylnebularine, or 2'-deoxynebularine
  misc_difference 103: note = a, c, g, inosine, u, deoxyadenosine, deoxyguanosine, deoxycytidine, deoxyinosine, thymine, ribonebularine, 2'-O-methylnebularine, or 2'-deoxynebularine

SEQ ID NO: 2861 - RNA, 103 nt, synthetic construct; identical to SEQ ID NO: 1795
  source 1..103: mol_type = other RNA
  modified_base 1: mod_base = OTHER; note = 2'-O-Methyl-cytidine phosphorothioate
  modified_base 2: mod_base = OTHER; note = 2'-O-Methyl-cytidine phosphorothioate
  modified_base 3: mod_base = OTHER; note = 2'-O-Methyl-cytidine
  modified_base 21: mod_base = OTHER; note = 2'-O-Methyl-guanosine
  modified_base 28: mod_base = OTHER; note = 2'-O-Methyl-adenosine
  modified_base 29: mod_base = OTHER; note = 2'-O-Methyl-guanosine
  modified_base 30: mod_base = OTHER; note = 2'-O-Methyl-cytidine
  modified_base 31: mod_base = OTHER; note = 2'-O-Methyl-uridine
  modified_base 32: mod_base = OTHER; note = 2'-O-Methyl-adenosine
  modified_base 34: mod_base = OTHER; note = 2'-O-Methyl-adenosine
  modified_base 35: mod_base = OTHER; note = 2'-O-Methyl-adenosine
  modified_base 36: mod_base = OTHER; note = 2'-O-Methyl-adenosine
  modified_base 37: mod_base = OTHER; note = 2'-O-Methyl-uridine
  modified_base 38: mod_base = OTHER; note = 2'-O-Methyl-adenosine
  modified_base 39: mod_base = OTHER; note = 2'-O-Methyl-guanosine
  modified_base 40: mod_base = OTHER; note = 2'-O-Methyl-cytidine
  modified_base 41: mod_base = OTHER; note = 2'-O-Methyl-adenosine
  modified_base 42: mod_base = OTHER; note = 2'-O-Methyl-adenosine
  modified_base 46: mod_base = OTHER; note = 2'-O-Methyl-adenosine
  modified_base 48: mod_base = OTHER; note = 2'-O-Methyl-adenosine
  modified_base 50: mod_base = OTHER; note = 2'-O-Methyl-uridine
  modified_base 52: mod_base = OTHER; note = 2'-O-Methyl-adenosine
  modified_base 53: mod_base = OTHER; note = 2'-O-Methyl-guanosine
  modified_base 54: mod_base = OTHER; note = 2'-O-Methyl-guanosine
  modified_base 55: mod_base = OTHER; note = 2'-O-Methyl-cytidine
  modified_base 56: mod_base = OTHER; note = 2'-O-Methyl-uridine
  modified_base 57: mod_base = OTHER; note = 2'-O-Methyl-adenosine
  modified_base 60: mod_base = OTHER; note = 2'-O-Methyl-cytidine
  modified_base 61: mod_base = OTHER; note = 2'-O-Methyl-cytidine
  modified_base 64: mod_base = OTHER; note = uridine phosphorothioate
  modified_base 66: mod_base = OTHER; note = 2'-O-Methyl-uridine
  modified_base 67: mod_base = OTHER; note = 2'-O-Methyl-cytidine
  modified_base 70: mod_base = OTHER; note = 2'-O-Methyl-cytidine
  modified_base 71: mod_base = OTHER; note = 2'-O-Methyl-uridine
  modified_base 72: mod_base = OTHER; note = 2'-O-Methyl-uridine
  modified_base 74: mod_base = OTHER; note = 2'-O-Methyl-adenosine
  modified_base 75: mod_base = OTHER; note = 2'-O-Methyl-adenosine
  modified_base 76: mod_base = OTHER; note = 2'-O-Methyl-adenosine
  modified_base 77: mod_base = OTHER; note = 2'-O-Methyl-adenosine
  modified_base 78: mod_base = OTHER; note = 2'-O-Methyl-adenosine
  modified_base 79: mod_base = OTHER; note = 2'-O-Methyl-guanosine
  modified_base 80: mod_base = OTHER; note = 2'-O-Methyl-uridine
  modified_base 81: mod_base = OTHER; note = 2'-O-Methyl-guanosine
  modified_base 83: mod_base = OTHER; note = 2'-O-Methyl-cytidine
  modified_base 84: mod_base = OTHER; note = 2'-O-Methyl-adenosine
  modified_base 85: mod_base = OTHER; note = 2'-O-Methyl-cytidine
  modified_base 86: mod_base = OTHER; note = 2'-O-Methyl-cytidine
  modified_base 87: mod_base = OTHER; note = 2'-O-Methyl-guanosine
  modified_base 88: mod_base = OTHER; note = 2'-O-Methyl-adenosine
  modified_base 89: mod_base = OTHER; note = 2'-O-Methyl-guanosine
  modified_base 90: mod_base = OTHER; note = 2'-O-Methyl-uridine
  modified_base 91: mod_base = OTHER; note = 2'-O-Methyl-cytidine
  modified_base 92: mod_base = OTHER; note = 2'-O-Methyl-guanosine
  modified_base 93: mod_base = OTHER; note = 2'-O-Methyl-guanosine
  modified_base 94: mod_base = OTHER; note = 2'-O-Methyl-uridine
  modified_base 95: mod_base = OTHER; note = 2'-O-Methyl-guanosine
  modified_base 96: mod_base = OTHER; note = 2'-O-Methyl-cytidine
  modified_base 97: mod_base = OTHER; note = 2'-O-Methyl-uridine phosphorothioate
  modified_base 98: mod_base = OTHER; note = 2'-O-Methyl-uridine phosphorothioate
  modified_base 99: mod_base = OTHER; note = 2'-O-Methyl-uridine phosphorothioate
  modified_base 100: mod_base = OTHER; note = 2'-O-Methyl-uridine
  misc_difference 101: note = a, c, g, inosine, u, deoxyadenosine, deoxyguanosine, deoxycytidine, deoxyinosine, thymine, ribonebularine, 2'-O-methylnebularine, or 2'-deoxynebularine
  misc_difference 102: note = a, c, g, inosine, u, deoxyadenosine, deoxyguanosine, deoxycytidine, deoxyinosine, thymine, ribonebularine, 2'-O-methylnebularine, or 2'-deoxynebularine
  misc_difference 103: note = a, c, g, inosine, u, deoxyadenosine, deoxyguanosine, deoxycytidine, deoxyinosine, thymine, ribonebularine, 2'-O-methylnebularine, or 2'-deoxynebularine

SEQ ID NO: 2862 - RNA, 103 nt, synthetic construct; identical to SEQ ID NO: 1796
  source 1..103: mol_type = other RNA
  modified_base 1: mod_base = OTHER; note = 2'-O-Methyl-guanosine phosphorothioate
  modified_base 2: mod_base = OTHER; note = 2'-O-Methyl-adenosine phosphorothioate
  modified_base 3: mod_base = OTHER; note = 2'-O-Methyl-guanosine
  modified_base 21: mod_base = OTHER; note = 2'-O-Methyl-guanosine
  modified_base 28: mod_base = OTHER; note = 2'-O-Methyl-adenosine
  modified_base 29: mod_base = OTHER; note = 2'-O-Methyl-guanosine
  modified_base 30: mod_base = OTHER; note = 2'-O-Methyl-cytidine
  modified_base 31: mod_base = OTHER; note = 2'-O-Methyl-uridine
  modified_base 32: mod_base = OTHER; note = 2'-O-Methyl-adenosine
  modified_base 33: mod_base = OTHER; note = 2'-O-Methyl-guanosine
  modified_base 34: mod_base = OTHER; note = 2'-O-Methyl-adenosine
  modified_base 35: mod_base = OTHER; note = 2'-O-Methyl-adenosine
  modified_base 36: mod_base = OTHER; note = 2'-O-Methyl-adenosine
  modified_base 37: mod_base = OTHER; note = 2'-O-Methyl-uridine
  modified_base 38: mod_base = OTHER; note = 2'-O-Methyl-adenosine
  modified_base 39: mod_base = OTHER; note = 2'-O-Methyl-guanosine
  modified_base 40: mod_base = OTHER; note = 2'-O-Methyl-cytidine
  modified_base 41: mod_base = OTHER; note = 2'-O-Methyl-adenosine
  modified_base 42: mod_base = OTHER; note = 2'-O-Methyl-adenosine
  modified_base 46: mod_base = OTHER; note = 2'-O-Methyl-adenosine
  modified_base 48: mod_base = OTHER; note = 2'-O-Methyl-adenosine
  modified_base 50: mod_base = OTHER; note = 2'-O-Methyl-uridine
  modified_base 52: mod_base = OTHER; note = 2'-O-Methyl-adenosine
  modified_base 53: mod_base = OTHER; note = 2'-O-Methyl-guanosine
  modified_base 54: mod_base = OTHER; note = 2'-O-Methyl-guanosine
  modified_base 55: mod_base = OTHER; note = 2'-O-Methyl-cytidine
  modified_base 56: mod_base = OTHER; note = 2'-O-Methyl-uridine
  modified_base 57: mod_base = OTHER; note = 2'-O-Methyl-adenosine
  modified_base 60: mod_base = OTHER; note = 2'-O-Methyl-cytidine
  modified_base 61: mod_base = OTHER; note = 2'-O-Methyl-cytidine
  modified_base 64: mod_base = OTHER; note = uridine phosphorothioate
  modified_base 66: mod_base = OTHER; note = 2'-O-Methyl-uridine
  modified_base 67: mod_base = OTHER; note = 2'-O-Methyl-cytidine
  modified_base 70: mod_base = OTHER; note = 2'-O-Methyl-cytidine
  modified_base 71: mod_base = OTHER; note = 2'-O-Methyl-uridine
  modified_base 72: mod_base = OTHER; note = 2'-O-Methyl-uridine
  modified_base 73: mod_base = OTHER; note = 2'-O-Methyl-guanosine
  modified_base 74: mod_base = OTHER; note = 2'-O-Methyl-adenosine
  modified_base 75: mod_base = OTHER; note = 2'-O-Methyl-adenosine
  modified_base 76: mod_base = OTHER; note = 2'-O-Methyl-adenosine
  modified_base 77: mod_base = OTHER; note = 2'-O-Methyl-adenosine
  modified_base 78: mod_base = OTHER; note = 2'-O-Methyl-adenosine
  modified_base 79: mod_base = OTHER; note = 2'-O-Methyl-guanosine
  modified_base 80: mod_base = OTHER; note = 2'-O-Methyl-uridine
  modified_base 81: mod_base = OTHER; note = 2'-O-Methyl-guanosine
  modified_base 83: mod_base = OTHER; note = 2'-O-Methyl-cytidine
  modified_base 84: mod_base = OTHER; note = 2'-O-Methyl-adenosine
  modified_base 85: mod_base = OTHER; note = 2'-O-Methyl-cytidine
  modified_base 86: mod_base = OTHER; note = 2'-O-Methyl-cytidine
  modified_base 87: mod_base = OTHER; note = 2'-O-Methyl-guanosine
  modified_base 88: mod_base = OTHER; note = 2'-O-Methyl-adenosine
  modified_base 89: mod_base = OTHER; note = 2'-O-Methyl-guanosine
  modified_base 90: mod_base = OTHER; note = 2'-O-Methyl-uridine
  modified_base 91: mod_base = OTHER; note = 2'-O-Methyl-cytidine
  modified_base 92: mod_base = OTHER; note = 2'-O-Methyl-guanosine
  modified_base 93: mod_base = OTHER; note = 2'-O-Methyl-guanosine
  modified_base 94: mod_base = OTHER; note = 2'-O-Methyl-uridine
  modified_base 95: mod_base = OTHER; note = 2'-O-Methyl-guanosine
  modified_base 96: mod_base = OTHER; note = 2'-O-Methyl-cytidine
  modified_base 97: mod_base = OTHER; note = 2'-O-Methyl-uridine phosphorothioate
  modified_base 98: mod_base = OTHER; note = 2'-O-Methyl-uridine phosphorothioate
  modified_base 99: mod_base = OTHER; note = 2'-O-Methyl-uridine phosphorothioate
  modified_base 100: mod_base = OTHER; note = 2'-O-Methyl-uridine
  misc_difference 101: note = a, c, g, inosine, u, deoxyadenosine, deoxyguanosine, deoxycytidine, deoxyinosine, thymine, ribonebularine, 2'-O-methylnebularine, or 2'-deoxynebularine
  misc_difference 102: note = a, c, g, inosine, u, deoxyadenosine, deoxyguanosine, deoxycytidine, deoxyinosine, thymine, ribonebularine, 2'-O-methylnebularine, or 2'-deoxynebularine
  misc_difference 103: note = a, c, g, inosine, u, deoxyadenosine, deoxyguanosine, deoxycytidine, deoxyinosine, thymine, ribonebularine, 2'-O-methylnebularine, or 2'-deoxynebularine

SEQ ID NO: 2863 - RNA, 103 nt, synthetic construct; identical to SEQ ID NO: 1796
  source 1..103: mol_type = other RNA
  modified_base 1: mod_base = OTHER; note = 2'-O-Methyl-guanosine phosphorothioate
  modified_base 2: mod_base = OTHER; note = 2'-O-Methyl-adenosine phosphorothioate
  modified_base 3: mod_base = OTHER; note = 2'-O-Methyl-guanosine
  modified_base 21: mod_base = OTHER; note = 2'-O-Methyl-guanosine
  modified_base 28: mod_base = OTHER; note = 2'-O-Methyl-adenosine
  modified_base 29: mod_base = OTHER; note = 2'-O-Methyl-guanosine
  modified_base 30: mod_base = OTHER; note = 2'-O-Methyl-cytidine
  modified_base 31: mod_base = OTHER; note = 2'-O-Methyl-uridine
  modified_base 32: mod_base = OTHER; note = 2'-O-Methyl-adenosine
  modified_base 34: mod_base = OTHER; note = 2'-O-Methyl-adenosine
  modified_base 35: mod_base = OTHER; note = 2'-O-Methyl-adenosine
  modified_base 36: mod_base = OTHER; note = 2'-O-Methyl-adenosine
  modified_base 37: mod_base = OTHER; note = 2'-O-Methyl-uridine
  modified_base 38: mod_base = OTHER; note = 2'-O-Methyl-adenosine
  modified_base 39: mod_base = OTHER; note = 2'-O-Methyl-guanosine
  modified_base 40: mod_base = OTHER; note = 2'-O-Methyl-cytidine
  modified_base 41: mod_base = OTHER; note = 2'-O-Methyl-adenosine
  modified_base 42: mod_base = OTHER; note = 2'-O-Methyl-adenosine
  modified_base 46: mod_base = OTHER; note = 2'-O-Methyl-adenosine
  modified_base 48: mod_base = OTHER; note = 2'-O-Methyl-adenosine
  modified_base 50: mod_base = OTHER; note = 2'-O-Methyl-uridine
  modified_base 52: mod_base = OTHER; note = 2'-O-Methyl-adenosine
  modified_base 53: mod_base = OTHER; note = 2'-O-Methyl-guanosine
  modified_base 54: mod_base = OTHER; note = 2'-O-Methyl-guanosine
  modified_base 55: mod_base = OTHER; note = 2'-O-Methyl-cytidine
  modified_base 56: mod_base = OTHER; note = 2'-O-Methyl-uridine
  modified_base 57: mod_base = OTHER; note = 2'-O-Methyl-adenosine
  modified_base 60: mod_base = OTHER; note = 2'-O-Methyl-cytidine
  modified_base 61: mod_base = OTHER; note = 2'-O-Methyl-cytidine
  modified_base 64: mod_base = OTHER; note = uridine phosphorothioate
  modified_base 66: mod_base = OTHER; note = 2'-O-Methyl-uridine
  modified_base 67: mod_base = OTHER; note = 2'-O-Methyl-cytidine
  modified_base 70: mod_base = OTHER; note = 2'-O-Methyl-cytidine
  modified_base 71: mod_base = OTHER; note = 2'-O-Methyl-uridine
  modified_base 72: mod_base = OTHER; note = 2'-O-Methyl-uridine
  modified_base 74: mod_base = OTHER; note = 2'-O-Methyl-adenosine
  modified_base 75: mod_base = OTHER; note = 2'-O-Methyl-adenosine
  modified_base 76: mod_base = OTHER; note = 2'-O-Methyl-adenosine
  modified_base 77: mod_base = OTHER; note = 2'-O-Methyl-adenosine
  modified_base 78: mod_base = OTHER; note = 2'-O-Methyl-adenosine
  modified_base 79: mod_base = OTHER; note = 2'-O-Methyl-guanosine
  modified_base 80: mod_base = OTHER; note = 2'-O-Methyl-uridine
  modified_base 81: mod_base = OTHER; note = 2'-O-Methyl-guanosine
  modified_base 83: mod_base = OTHER; note = 2'-O-Methyl-cytidine
  modified_base 84: mod_base = OTHER; note = 2'-O-Methyl-adenosine
  modified_base 85: mod_base = OTHER; note = 2'-O-Methyl-cytidine
  modified_base 86: mod_base = OTHER; note = 2'-O-Methyl-cytidine
  modified_base 87: mod_base = OTHER; note = 2'-O-Methyl-guanosine
  modified_base 88: mod_base = OTHER; note = 2'-O-Methyl-adenosine
  modified_base 89: mod_base = OTHER; note = 2'-O-Methyl-guanosine
  modified_base 90: mod_base = OTHER; note = 2'-O-Methyl-uridine
  modified_base 91: mod_base = OTHER; note = 2'-O-Methyl-cytidine
  modified_base 92: mod_base = OTHER; note = 2'-O-Methyl-guanosine
  modified_base 93: mod_base = OTHER; note = 2'-O-Methyl-guanosine
  modified_base 94: mod_base = OTHER; note = 2'-O-Methyl-uridine
  modified_base 95: mod_base = OTHER; note = 2'-O-Methyl-guanosine
  modified_base 96: mod_base = OTHER; note = 2'-O-Methyl-cytidine
  modified_base 97: mod_base = OTHER; note = 2'-O-Methyl-uridine phosphorothioate
  modified_base 98: mod_base = OTHER; note = 2'-O-Methyl-uridine phosphorothioate
  modified_base 99: mod_base = OTHER; note = 2'-O-Methyl-uridine phosphorothioate
  modified_base 100: mod_base = OTHER; note = 2'-O-Methyl-uridine
  misc_difference 101: note = a, c, g, inosine, u, deoxyadenosine, deoxyguanosine, deoxycytidine, deoxyinosine, thymine, ribonebularine, 2'-O-methylnebularine, or 2'-deoxynebularine
  misc_difference 102: note = a, c, g, inosine, u, deoxyadenosine, deoxyguanosine, deoxycytidine, deoxyinosine, thymine, ribonebularine, 2'-O-methylnebularine, or 2'-deoxynebularine
  misc_difference 103: note = a, c, g, inosine, u, deoxyadenosine, deoxyguanosine, deoxycytidine, deoxyinosine, thymine, ribonebularine, 2'-O-methylnebularine, or 2'-deoxynebularine

SEQ ID NO: 2864 - RNA, 103 nt, synthetic construct; identical to SEQ ID NO: 1797
  source 1..103: mol_type = other RNA
  modified_base 1: mod_base = OTHER; note = 2'-O-Methyl-cytidine phosphorothioate
  modified_base 2: mod_base = OTHER; note = 2'-O-Methyl-adenosine phosphorothioate
  modified_base 3: mod_base = OTHER; note = 2'-O-Methyl-guanosine
  modified_base 21: mod_base = OTHER; note = 2'-O-Methyl-guanosine
  modified_base 28: mod_base = OTHER; note = 2'-O-Methyl-adenosine
  modified_base 29: mod_base = OTHER; note = 2'-O-Methyl-guanosine
  modified_base 30: mod_base = OTHER; note = 2'-O-Methyl-cytidine
  modified_base 31: mod_base = OTHER; note = 2'-O-Methyl-uridine
  modified_base 32: mod_base = OTHER; note = 2'-O-Methyl-adenosine
  modified_base 33: mod_base = OTHER; note = 2'-O-Methyl-guanosine
  modified_base 34: mod_base = OTHER; note = 2'-O-Methyl-adenosine
  modified_base 35: mod_base = OTHER; note = 2'-O-Methyl-adenosine
  modified_base 36: mod_base = OTHER; note = 2'-O-Methyl-adenosine
  modified_base 37: mod_base = OTHER; note = 2'-O-Methyl-uridine
  modified_base 38: mod_base = OTHER; note = 2'-O-Methyl-adenosine
  modified_base 39: mod_base = OTHER; note = 2'-O-Methyl-guanosine
  modified_base 40: mod_base = OTHER; note = 2'-O-Methyl-cytidine
  modified_base 41: mod_base = OTHER; note = 2'-O-Methyl-adenosine
  modified_base 42: mod_base = OTHER; note = 2'-O-Methyl-adenosine
  modified_base 46: mod_base = OTHER; note = 2'-O-Methyl-adenosine
  modified_base 48: mod_base = OTHER; note = 2'-O-Methyl-adenosine
  modified_base 50: mod_base = OTHER; note = 2'-O-Methyl-uridine
  modified_base 52: mod_base = OTHER; note = 2'-O-Methyl-adenosine
  modified_base 53: mod_base = OTHER; note = 2'-O-Methyl-guanosine
  modified_base 54: mod_base = OTHER; note = 2'-O-Methyl-guanosine
  modified_base 57: mod_base = OTHER; note = 2'-O-Methyl-adenosine
  modified_base 61: mod_base = OTHER; note = 2'-O-Methyl-cytidine
  modified_base 64: mod_base = OTHER; note = uridine phosphorothioate
  modified_base 66: mod_base = OTHER; note = 2'-O-Methyl-uridine
  modified_base 67: mod_base = OTHER; note = 2'-O-Methyl-cytidine
  modified_base 70: mod_base = OTHER; note = 2'-O-Methyl-cytidine
  modified_base 71: mod_base = OTHER; note = 2'-O-Methyl-uridine
  modified_base 72: mod_base = OTHER; note = 2'-O-Methyl-uridine
  modified_base 74: mod_base = OTHER; note = 2'-O-Methyl-adenosine
  modified_base 75: mod_base = OTHER; note = 2'-O-Methyl-adenosine
  modified_base 76: mod_base = OTHER; note = 2'-O-Methyl-adenosine
  modified_base 77: mod_base = OTHER; note = 2'-O-Methyl-adenosine
  modified_base 78: mod_base = OTHER; note = 2'-O-Methyl-adenosine
  modified_base 79: mod_base = OTHER; note = 2'-O-Methyl-guanosine
  modified_base 80: mod_base = OTHER; note = 2'-O-Methyl-uridine
  modified_base 82: mod_base = OTHER; note = 2'-O-Methyl-guanosine
  modified_base 83: mod_base = OTHER; note = 2'-O-Methyl-cytidine
  modified_base 84: mod_base = OTHER; note = 2'-O-Methyl-adenosine
  modified_base 85: mod_base = OTHER; note = 2'-O-Methyl-cytidine
  modified_base 86: mod_base = OTHER; note = 2'-O-Methyl-cytidine
  modified_base 87: mod_base = OTHER; note = 2'-O-Methyl-guanosine
  modified_base 89: mod_base = OTHER; note = 2'-O-Methyl-guanosine
  modified_base 92: mod_base = OTHER; note = 2'-O-Methyl-guanosine
  modified_base 93: mod_base = OTHER; note = 2'-O-Methyl-guanosine
  modified_base 94: mod_base = OTHER; note = 2'-O-Methyl-uridine
  modified_base 95: mod_base = OTHER; note = 2'-O-Methyl-guanosine
  modified_base 96: mod_base = OTHER; note = 2'-O-Methyl-cytidine
  modified_base 97: mod_base = OTHER; note = 2'-O-Methyl-uridine phosphorothioate
  modified_base 98: mod_base = OTHER; note = 2'-O-Methyl-uridine phosphorothioate
  modified_base 99: mod_base = OTHER; note = 2'-O-Methyl-uridine phosphorothioate
  modified_base 100: mod_base = OTHER; note = 2'-O-Methyl-uridine
  misc_difference 101: note = a, c, g, inosine, u, deoxyadenosine, deoxyguanosine, deoxycytidine, deoxyinosine, thymine, ribonebularine, 2'-O-methylnebularine, or 2'-deoxynebularine
  misc_difference 102: note = a, c, g, inosine, u, deoxyadenosine, deoxyguanosine, deoxycytidine, deoxyinosine, thymine, ribonebularine, 2'-O-methylnebularine, or 2'-deoxynebularine
  misc_difference 103: note = a, c, g, inosine, u, deoxyadenosine, deoxyguanosine, deoxycytidine, deoxyinosine, thymine, ribonebularine, 2'-O-methylnebularine, or 2'-deoxynebularine

SEQ ID NO: 2865 - RNA, 103 nt, synthetic construct; identical to SEQ ID NO: 1797
  source 1..103: mol_type = other RNA
  modified_base 1: mod_base = OTHER; note = 2'-O-Methyl-cytidine phosphorothioate
  modified_base 2: mod_base = OTHER; note = 2'-O-Methyl-adenosine phosphorothioate
  modified_base 3: mod_base = OTHER; note = 2'-O-Methyl-guanosine
  modified_base 21: mod_base = OTHER; note = 2'-O-Methyl-guanosine
  modified_base 28: mod_base = OTHER; note = 2'-O-Methyl-adenosine
  modified_base 29: mod_base = OTHER; note = 2'-O-Methyl-guanosine
  modified_base 30: mod_base = OTHER; note = 2'-O-Methyl-cytidine
  modified_base 31: mod_base = OTHER; note = 2'-O-Methyl-uridine
  modified_base 32: mod_base = OTHER; note = 2'-O-Methyl-adenosine
  modified_base 33: mod_base = OTHER; note = 2'-O-Methyl-guanosine
  modified_base 34: mod_base = OTHER; note = 2'-O-Methyl-adenosine
  modified_base 35: mod_base = OTHER; note = 2'-O-Methyl-adenosine
  modified_base 36: mod_base = OTHER; note = 2'-O-Methyl-adenosine
  modified_base 37: mod_base = OTHER; note = 2'-O-Methyl-uridine
  modified_base 38: mod_base = OTHER; note = 2'-O-Methyl-adenosine
  modified_base 39: mod_base = OTHER; note = 2'-O-Methyl-guanosine
  modified_base 40: mod_base = OTHER; note = 2'-O-Methyl-cytidine
  modified_base 41: mod_base = OTHER; note = 2'-O-Methyl-adenosine
  modified_base 42: mod_base = OTHER; note = 2'-O-Methyl-adenosine
  modified_base 46: mod_base = OTHER; note = 2'-O-Methyl-adenosine
  modified_base 48: mod_base = OTHER; note = 2'-O-Methyl-adenosine
  modified_base 50: mod_base = OTHER; note = 2'-O-Methyl-uridine
  modified_base 52: mod_base = OTHER; note = 2'-O-Methyl-adenosine
  modified_base 53: mod_base = OTHER; note = 2'-O-Methyl-guanosine
  modified_base 54: mod_base = OTHER; note = 2'-O-Methyl-guanosine
  modified_base 55: mod_base = OTHER; note = 2'-O-Methyl-cytidine
  modified_base 56: mod_base = OTHER; note = 2'-O-Methyl-uridine
  modified_base 57: mod_base = OTHER; note = 2'-O-Methyl-adenosine
  modified_base 60: mod_base = OTHER; note = 2'-O-Methyl-cytidine
  modified_base 61: mod_base = OTHER; note = 2'-O-Methyl-cytidine
  modified_base 64: mod_base = OTHER; note = uridine phosphorothioate
  modified_base 66: mod_base = OTHER; note = 2'-O-Methyl-uridine
  modified_base 67: mod_base = OTHER; note = 2'-O-Methyl-cytidine
  modified_base 70: mod_base = OTHER; note = 2'-O-Methyl-cytidine
  modified_base 71: mod_base = OTHER; note = 2'-O-Methyl-uridine
  modified_base 72: mod_base = OTHER; note = 2'-O-Methyl-uridine
  modified_base 74: mod_base = OTHER; note = 2'-O-Methyl-adenosine
  modified_base 75: mod_base = OTHER; note = 2'-O-Methyl-adenosine
  modified_base 76: mod_base = OTHER; note = 2'-O-Methyl-adenosine
  modified_base 77: mod_base = OTHER; note = 2'-O-Methyl-adenosine
  modified_base 78: mod_base = OTHER; note = 2'-O-Methyl-adenosine
  modified_base 79: mod_base = OTHER; note = 2'-O-Methyl-guanosine
  modified_base 80: mod_base = OTHER; note = 2'-O-Methyl-uridine
  modified_base 82: mod_base = OTHER; note = 2'-O-Methyl-guanosine
  modified_base 83: mod_base = OTHER; note = 2'-O-Methyl-cytidine
  modified_base 84: mod_base = OTHER; note = 2'-O-Methyl-adenosine
  modified_base 85: mod_base = OTHER; note = 2'-O-Methyl-cytidine
  modified_base 86: mod_base = OTHER; note = 2'-O-Methyl-cytidine
  modified_base 87: mod_base = OTHER; note = 2'-O-Methyl-guanosine
  modified_base 89: mod_base = OTHER; note = 2'-O-Methyl-guanosine
  modified_base 92: mod_base = OTHER; note = 2'-O-Methyl-guanosine
  modified_base 93: mod_base = OTHER; note = 2'-O-Methyl-guanosine
  modified_base 94: mod_base = OTHER; note = 2'-O-Methyl-uridine
  modified_base 95: mod_base = OTHER; note = 2'-O-Methyl-guanosine
  modified_base 96: mod_base = OTHER; note = 2'-O-Methyl-cytidine
  modified_base 97: mod_base = OTHER; note = 2'-O-Methyl-uridine phosphorothioate
  modified_base 98: mod_base = OTHER; note = 2'-O-Methyl-uridine phosphorothioate
  modified_base 99: mod_base = OTHER; note = 2'-O-Methyl-uridine phosphorothioate
  modified_base 100: mod_base = OTHER; note = 2'-O-Methyl-uridine
  misc_difference 101: note = a, c, g, inosine, u, deoxyadenosine, deoxyguanosine, deoxycytidine, deoxyinosine, thymine, ribonebularine, 2'-O-methylnebularine, or 2'-deoxynebularine
  misc_difference 102: note = a, c, g, inosine, u, deoxyadenosine, deoxyguanosine, deoxycytidine, deoxyinosine, thymine, ribonebularine, 2'-O-methylnebularine, or 2'-deoxynebularine
  misc_difference 103: note = a, c, g, inosine, u, deoxyadenosine, deoxyguanosine, deoxycytidine, deoxyinosine, thymine, ribonebularine, 2'-O-methylnebularine, or 2'-deoxynebularine

SEQ ID NO: 2866 - RNA, 103 nt, synthetic construct; identical to SEQ ID NO: 1797
  source 1..103: mol_type = other RNA
  modified_base 1: mod_base = OTHER; note = 2'-O-Methyl-cytidine phosphorothioate
  modified_base 2: mod_base = OTHER; note = 2'-O-Methyl-adenosine phosphorothioate
  modified_base 3: mod_base = OTHER; note = 2'-O-Methyl-guanosine
  modified_base 21: mod_base = OTHER; note = 2'-O-Methyl-guanosine
  modified_base 28: mod_base = OTHER; note = 2'-O-Methyl-adenosine
  modified_base 29: mod_base = OTHER; note = 2'-O-Methyl-guanosine
  modified_base 30: mod_base = OTHER; note = 2'-O-Methyl-cytidine
  modified_base 31: mod_base = OTHER; note = 2'-O-Methyl-uridine
  modified_base 32: mod_base = OTHER; note = 2'-O-Methyl-adenosine
  modified_base 33: mod_base = OTHER; note = 2'-O-Methyl-guanosine
  modified_base 34: mod_base = OTHER; note = 2'-O-Methyl-adenosine
  modified_base 35: mod_base = OTHER; note = 2'-O-Methyl-adenosine
  modified_base 36: mod_base = OTHER; note = 2'-O-Methyl-adenosine
  modified_base 37: mod_base = OTHER; note = 2'-O-Methyl-uridine
  modified_base 38: mod_base = OTHER; note = 2'-O-Methyl-adenosine
  modified_base 39: mod_base = OTHER; note = 2'-O-Methyl-guanosine
  modified_base 40: mod_base = OTHER; note = 2'-O-Methyl-cytidine
  modified_base 41: mod_base = OTHER; note = 2'-O-Methyl-adenosine
  modified_base 42: mod_base = OTHER; note = 2'-O-Methyl-adenosine
  modified_base 46: mod_base = OTHER; note = 2'-O-Methyl-adenosine
  modified_base 48: mod_base = OTHER; note = 2'-O-Methyl-adenosine
  modified_base 50: mod_base = OTHER; note = 2'-O-Methyl-uridine
  modified_base 52: mod_base = OTHER; note = 2'-O-Methyl-adenosine
  modified_base 53: mod_base = OTHER; note = 2'-O-Methyl-guanosine
  modified_base 54: mod_base = OTHER; note = 2'-O-Methyl-guanosine
  modified_base 57: mod_base = OTHER; note = 2'-O-Methyl-adenosine
  modified_base 61: mod_base = OTHER; note = 2'-O-Methyl-cytidine
  modified_base 64: mod_base = OTHER; note = uridine phosphorothioate
  modified_base 66: mod_base = OTHER; note = 2'-O-Methyl-uridine
  modified_base 67: mod_base = OTHER; note = 2'-O-Methyl-cytidine
  modified_base 70: mod_base = OTHER; note = 2'-O-Methyl-cytidine
  modified_base 71: mod_base = OTHER; note = 2'-O-Methyl-uridine
  modified_base 72: mod_base = OTHER; note = 2'-O-Methyl-uridine
  modified_base 73: mod_base = OTHER; note = 2'-O-Methyl-guanosine
  modified_base 74: mod_base = OTHER; note = 2'-O-Methyl-adenosine
  modified_base 75: mod_base = OTHER; note = 2'-O-Methyl-adenosine
  modified_base 76: mod_base = OTHER; note = 2'-O-Methyl-adenosine
  modified_base 77: mod_base = OTHER; note = 2'-O-Methyl-adenosine
  modified_base 78: mod_base = OTHER; note = 2'-O-Methyl-adenosine
  modified_base 79: mod_base = OTHER; note = 2'-O-Methyl-guanosine
  modified_base 80: mod_base = OTHER; note = 2'-O-Methyl-uridine
  modified_base 82: mod_base = OTHER; note = 2'-O-Methyl-guanosine
  modified_base 83: mod_base = OTHER; note = 2'-O-Methyl-cytidine
  modified_base 84: mod_base = OTHER; note = 2'-O-Methyl-adenosine
  modified_base 85: mod_base = OTHER; note = 2'-O-Methyl-cytidine
  modified_base 86: mod_base = OTHER; note = 2'-O-Methyl-cytidine
  modified_base 87: mod_base = OTHER; note = 2'-O-Methyl-guanosine
  modified_base 89: mod_base = OTHER; note = 2'-O-Methyl-guanosine
  modified_base 92: mod_base = OTHER; note = 2'-O-Methyl-guanosine
  modified_base 93: mod_base = OTHER; note = 2'-O-Methyl-guanosine
  modified_base 94: mod_base = OTHER; note = 2'-O-Methyl-uridine
  modified_base 95: mod_base = OTHER; note = 2'-O-Methyl-guanosine
  modified_base 96: mod_base = OTHER; note = 2'-O-Methyl-cytidine
  modified_base 97: mod_base = OTHER; note = 2'-O-Methyl-uridine phosphorothioate
  modified_base 98: mod_base = OTHER; note = 2'-O-Methyl-uridine phosphorothioate
  modified_base 99: mod_base = OTHER; note = 2'-O-Methyl-uridine phosphorothioate
  modified_base 100: mod_base = OTHER; note = 2'-O-Methyl-uridine
  misc_difference 101: note = a, c, g, inosine, u, deoxyadenosine, deoxyguanosine, deoxycytidine, deoxyinosine, thymine, ribonebularine, 2'-O-methylnebularine, or 2'-deoxynebularine
  misc_difference 102: note = a, c, g, inosine, u, deoxyadenosine, deoxyguanosine, deoxycytidine, deoxyinosine, thymine, ribonebularine, 2'-O-methylnebularine, or 2'-deoxynebularine
  misc_difference 103: note = a, c, g, inosine, u, deoxyadenosine, deoxyguanosine, deoxycytidine, deoxyinosine, thymine, ribonebularine, 2'-O-methylnebularine, or 2'-deoxynebularine

SEQ ID NO: 2867 - RNA, 103 nt, synthetic construct; identical to SEQ ID NO: 1797
  source 1..103: mol_type = other RNA
  modified_base 1: mod_base = OTHER; note = 2'-O-Methyl-cytidine phosphorothioate
  modified_base 2: mod_base = OTHER; note = 2'-O-Methyl-adenosine phosphorothioate
  modified_base 3: mod_base = OTHER; note = 2'-O-Methyl-guanosine
  modified_base 21: mod_base = OTHER; note = 2'-O-Methyl-guanosine
  modified_base 28: mod_base = OTHER; note = 2'-O-Methyl-adenosine
  modified_base 29: mod_base = OTHER; note = 2'-O-Methyl-guanosine
  modified_base 30: mod_base = OTHER; note = 2'-O-Methyl-cytidine
  modified_base 31: mod_base = OTHER; note = 2'-O-Methyl-uridine
  modified_base 32: mod_base = OTHER; note = 2'-O-Methyl-adenosine
  modified_base 33: mod_base = OTHER; note = 2'-O-Methyl-guanosine
  modified_base 34: mod_base = OTHER; note = 2'-O-Methyl-adenosine
  modified_base 35: mod_base = OTHER; note = 2'-O-Methyl-adenosine
  modified_base 36: mod_base = OTHER; note = 2'-O-Methyl-adenosine
  modified_base 37: mod_base = OTHER; note = 2'-O-Methyl-uridine
  modified_base 38: mod_base = OTHER; note = 2'-O-Methyl-adenosine
  modified_base 39: mod_base = OTHER; note = 2'-O-Methyl-guanosine
  modified_base 40: mod_base = OTHER; note = 2'-O-Methyl-cytidine
  modified_base 41: mod_base = OTHER; note = 2'-O-Methyl-adenosine
  modified_base 42: mod_base = OTHER; note = 2'-O-Methyl-adenosine
  modified_base 46: mod_base = OTHER; note = 2'-O-Methyl-adenosine
  modified_base 48: mod_base = OTHER; note = 2'-O-Methyl-adenosine
  modified_base 50: mod_base = OTHER; note = 2'-O-Methyl-uridine
  modified_base 52: mod_base = OTHER; note = 2'-O-Methyl-adenosine
  modified_base 53: mod_base = OTHER; note = 2'-O-Methyl-guanosine
  modified_base 54: mod_base = OTHER; note = 2'-O-Methyl-guanosine
  modified_base 57: mod_base = OTHER; note = 2'-O-Methyl-adenosine
  modified_base 61: mod_base = OTHER; note = 2'-O-Methyl-cytidine
  modified_base 64: mod_base = OTHER; note = uridine phosphorothioate
  modified_base 66: mod_base = OTHER; note = 2'-O-Methyl-uridine
  modified_base 67: mod_base = OTHER; note = 2'-O-Methyl-cytidine
  modified_base 70: mod_base = OTHER; note = 2'-O-Methyl-cytidine
  modified_base 71: mod_base = OTHER; note = 2'-O-Methyl-uridine
  modified_base 72: mod_base = OTHER; note = 2'-O-Methyl-uridine
  modified_base 73: mod_base = OTHER; note = 2'-O-Methyl-guanosine
  modified_base 74: mod_base = OTHER; note = 2'-O-Methyl-adenosine
  modified_base 75: mod_base = OTHER; note = 2'-O-Methyl-adenosine
  modified_base 76: mod_base = OTHER; note = 2'-O-Methyl-adenosine
  modified_base 77: mod_base = OTHER; note = 2'-O-Methyl-adenosine
  modified_base 78: mod_base = OTHER; note = 2'-O-Methyl-adenosine
  modified_base 79: mod_base = OTHER; note = 2'-O-Methyl-guanosine
  modified_base 80: mod_base = OTHER; note = 2'-O-Methyl-uridine
  modified_base 82: mod_base = OTHER; note = 2'-O-Methyl-guanosine
  modified_base 83: mod_base = OTHER; note = 2'-O-Methyl-cytidine
  modified_base 84: mod_base = OTHER; note = 2'-O-Methyl-adenosine
  modified_base 85: mod_base = OTHER; note = 2'-O-Methyl-cytidine
  modified_base 86: mod_base = OTHER; note = 2'-O-Methyl-cytidine
  modified_base 87: mod_base = OTHER; note = 2'-O-Methyl-guanosine
  modified_base 89: mod_base = OTHER; note = 2'-O-Methyl-guanosine
  modified_base 91: mod_base = OTHER; note = 2'-O-Methyl-cytidine
  modified_base 92: mod_base = OTHER; note = 2'-O-Methyl-guanosine
  modified_base 93: mod_base = OTHER; note = 2'-O-Methyl-guanosine
  modified_base 94: mod_base = OTHER; note = 2'-O-Methyl-uridine
  modified_base 95: mod_base = OTHER; note = 2'-O-Methyl-guanosine
  modified_base 96: mod_base = OTHER; note = 2'-O-Methyl-cytidine
  modified_base 97: mod_base = OTHER; note = 2'-O-Methyl-uridine phosphorothioate
  modified_base 98: mod_base = OTHER; note = 2'-O-Methyl-uridine phosphorothioate
  modified_base 99: mod_base = OTHER; note = 2'-O-Methyl-uridine phosphorothioate
  modified_base 100: mod_base = OTHER; note = 2'-O-Methyl-uridine
  misc_difference 101: note = a, c, g, inosine, u, deoxyadenosine, deoxyguanosine, deoxycytidine, deoxyinosine, thymine, ribonebularine, 2'-O-methylnebularine, or 2'-deoxynebularine
  misc_difference 102: note = a, c, g, inosine, u, deoxyadenosine, deoxyguanosine, deoxycytidine, deoxyinosine, thymine, ribonebularine, 2'-O-methylnebularine, or 2'-deoxynebularine
  misc_difference 103: note = a, c, g, inosine, u, deoxyadenosine, deoxyguanosine, deoxycytidine, deoxyinosine, thymine, ribonebularine, 2'-O-methylnebularine, or 2'-deoxynebularine

SEQ ID NO: 2868 - RNA, 103 nt, synthetic construct; identical to SEQ ID NO: 1797
  source 1..103: mol_type = other RNA
  modified_base 1: mod_base = OTHER; note = 2'-O-Methyl-cytidine phosphorothioate
  modified_base 2: mod_base = OTHER; note = 2'-O-Methyl-adenosine phosphorothioate
  modified_base 3: mod_base = OTHER; note = 2'-O-Methyl-guanosine
  modified_base 21: mod_base = OTHER; note = 2'-O-Methyl-guanosine
  modified_base 28: mod_base = OTHER; note = 2'-O-Methyl-adenosine
  modified_base 29: mod_base = OTHER; note = 2'-O-Methyl-guanosine
  modified_base 30: mod_base = OTHER; note = 2'-O-Methyl-cytidine
  modified_base 31: mod_base = OTHER; note = 2'-O-Methyl-uridine
  modified_base 32: mod_base = OTHER; note = 2'-O-Methyl-adenosine
  modified_base 34: mod_base = OTHER; note = 2'-O-Methyl-adenosine
  modified_base 35: mod_base = OTHER; note = 2'-O-Methyl-adenosine
  modified_base 36: mod_base = OTHER; note = 2'-O-Methyl-adenosine
  modified_base 37: mod_base = OTHER; note = 2'-O-Methyl-uridine
  modified_base 38: mod_base = OTHER; note = 2'-O-Methyl-adenosine
  modified_base 39: mod_base = OTHER; note = 2'-O-Methyl-guanosine
  modified_base 40: mod_base = OTHER; note = 2'-O-Methyl-cytidine
  modified_base 41: mod_base = OTHER; note = 2'-O-Methyl-adenosine
  modified_base 42: mod_base = OTHER; note = 2'-O-Methyl-adenosine
  modified_base 46: mod_base = OTHER; note = 2'-O-Methyl-adenosine
  modified_base 48: mod_base = OTHER; note = 2'-O-Methyl-adenosine
  modified_base 50: mod_base = OTHER; note = 2'-O-Methyl-uridine
  modified_base 52: mod_base = OTHER; note = 2'-O-Methyl-adenosine
  modified_base 53: mod_base = OTHER; note = 2'-O-Methyl-guanosine
  modified_base 54: mod_base = OTHER; note = 2'-O-Methyl-guanosine
  modified_base 57: mod_base = OTHER; note = 2'-O-Methyl-adenosine
  modified_base 61: mod_base = OTHER; note = 2'-O-Methyl-cytidine
  modified_base 64: mod_base = OTHER; note = uridine phosphorothioate
  modified_base 66: mod_base = OTHER; note = 2'-O-Methyl-uridine
  modified_base 67: mod_base = OTHER; note = 2'-O-Methyl-cytidine
  modified_base 70: mod_base = OTHER; note = 2'-O-Methyl-cytidine
  modified_base 71: mod_base = OTHER; note = 2'-O-Methyl-uridine
  modified_base 72: mod_base = OTHER; note = 2'-O-Methyl-uridine
  modified_base 73: mod_base = OTHER; note = 2'-O-Methyl-guanosine
  modified_base 74: mod_base = OTHER; note = 2'-O-Methyl-adenosine
  modified_base 75: mod_base = OTHER; note = 2'-O-Methyl-adenosine
  modified_base 76: mod_base = OTHER; note = 2'-O-Methyl-adenosine
  modified_base 77: mod_base = OTHER; note = 2'-O-Methyl-adenosine
  modified_base 78: mod_base = OTHER; note = 2'-O-Methyl-adenosine
  modified_base 79: mod_base = OTHER; note = 2'-O-Methyl-guanosine
  modified_base 80: mod_base = OTHER; note = 2'-O-Methyl-uridine
  modified_base 82: mod_base = OTHER; note = 2'-O-Methyl-guanosine
  modified_base 83: mod_base = OTHER; note = 2'-O-Methyl-cytidine
  modified_base 84: mod_base = OTHER; note = 2'-O-Methyl-adenosine
  modified_base 85: mod_base = OTHER; note = 2'-O-Methyl-cytidine
  modified_base 86: mod_base = OTHER; note = 2'-O-Methyl-cytidine
  modified_base 87: mod_base = OTHER; note = 2'-O-Methyl-guanosine
  modified_base 89: mod_base = OTHER; note = 2'-O-Methyl-guanosine
  modified_base 92: mod_base = OTHER; note = 2'-O-Methyl-guanosine
  modified_base 93: mod_base = OTHER; note = 2'-O-Methyl-guanosine
  modified_base 94: mod_base = OTHER; note = 2'-O-Methyl-uridine
  modified_base 95: mod_base = OTHER; note = 2'-O-Methyl-guanosine
  modified_base 96: mod_base = OTHER; note = 2'-O-Methyl-cytidine
  modified_base 97: mod_base = OTHER; note = 2'-O-Methyl-uridine phosphorothioate
  modified_base 98: mod_base = OTHER; note = 2'-O-Methyl-uridine phosphorothioate
  modified_base 99: mod_base = OTHER; note = 2'-O-Methyl-uridine phosphorothioate
  modified_base 100: mod_base = OTHER; note = 2'-O-Methyl-uridine
  misc_difference 101: note = a, c, g, inosine, u, deoxyadenosine, deoxyguanosine, deoxycytidine, deoxyinosine, thymine, ribonebularine, 2'-O-methylnebularine, or 2'-deoxynebularine
  misc_difference 102: note = a, c, g, inosine, u, deoxyadenosine, deoxyguanosine, deoxycytidine, deoxyinosine, thymine, ribonebularine, 2'-O-methylnebularine, or 2'-deoxynebularine
  misc_difference 103: note = a, c, g, inosine, u, deoxyadenosine, deoxyguanosine, deoxycytidine, deoxyinosine, thymine, ribonebularine, 2'-O-methylnebularine, or 2'-deoxynebularine

SEQ ID NO: 2869 - RNA, 103 nt, synthetic construct; identical to SEQ ID NO: 1797
  source 1..103: mol_type = other RNA
  modified_base 1: mod_base = OTHER; note = 2'-O-Methyl-cytidine phosphorothioate
  modified_base 2: mod_base = OTHER; note = 2'-O-Methyl-adenosine phosphorothioate
  modified_base 3: mod_base = OTHER; note = 2'-O-Methyl-guanosine
  modified_base 21: mod_base = OTHER; note = 2'-O-Methyl-guanosine
  modified_base 28: mod_base = OTHER; note = 2'-O-Methyl-adenosine
  modified_base 29: mod_base = OTHER; note = 2'-O-Methyl-guanosine
  modified_base 30: mod_base = OTHER; note = 2'-O-Methyl-cytidine
  modified_base 31: mod_base = OTHER; note = 2'-O-Methyl-uridine
  modified_base 32: mod_base = OTHER; note = 2'-O-Methyl-adenosine
  modified_base 34: mod_base = OTHER; note = 2'-O-Methyl-adenosine
  modified_base 35: mod_base = OTHER; note = 2'-O-Methyl-adenosine
  modified_base 36: mod_base = OTHER; note = 2'-O-Methyl-adenosine
  modified_base 37: mod_base = OTHER; note = 2'-O-Methyl-uridine
  modified_base 38: mod_base = OTHER; note = 2'-O-Methyl-adenosine
  modified_base 39: mod_base = OTHER; note = 2'-O-Methyl-guanosine
  modified_base 40: mod_base = OTHER; note = 2'-O-Methyl-cytidine
  modified_base 41: mod_base = OTHER; note = 2'-O-Methyl-adenosine
  modified_base 42: mod_base = OTHER; note = 2'-O-Methyl-adenosine
  modified_base 46: mod_base = OTHER; note = 2'-O-Methyl-adenosine
  modified_base 48: mod_base = OTHER; note = 2'-O-Methyl-adenosine
  modified_base 50: mod_base = OTHER; note = 2'-O-Methyl-uridine
  modified_base 52: mod_base = OTHER; note = 2'-O-Methyl-adenosine
  modified_base 53: mod_base = OTHER; note = 2'-O-Methyl-guanosine
  modified_base 54: mod_base = OTHER; note = 2'-O-Methyl-guanosine
  modified_base 57: mod_base = OTHER; note = 2'-O-Methyl-adenosine
  modified_base 61: mod_base = OTHER; note = 2'-O-Methyl-cytidine
  modified_base 64: mod_base = OTHER; note = uridine phosphorothioate
  modified_base 66: mod_base = OTHER; note = 2'-O-Methyl-uridine
  modified_base 67: mod_base = OTHER; note = 2'-O-Methyl-cytidine
  modified_base 70: mod_base = OTHER; note = 2'-O-Methyl-cytidine
  modified_base 71: mod_base = OTHER; note = 2'-O-Methyl-uridine
  modified_base 72: mod_base = OTHER; note = 2'-O-Methyl-uridine
  modified_base 73: mod_base = OTHER; note = 2'-O-Methyl-guanosine
  modified_base 74: mod_base = OTHER; note = 2'-O-Methyl-adenosine
  modified_base 75: mod_base = OTHER; note = 2'-O-Methyl-adenosine
  modified_base 76: mod_base = OTHER; note = 2'-O-Methyl-adenosine
  modified_base 77: mod_base = OTHER; note = 2'-O-Methyl-adenosine
  modified_base 78: mod_base = OTHER; note = 2'-O-Methyl-adenosine
  modified_base 79: mod_base = OTHER; note = 2'-O-Methyl-guanosine
  modified_base 80: mod_base = OTHER; note = 2'-O-Methyl-uridine
  modified_base 82: mod_base = OTHER; note = 2'-O-Methyl-guanosine
  modified_base 83: mod_base = OTHER; note = 2'-O-Methyl-cytidine
  modified_base 84: mod_base = OTHER; note = 2'-O-Methyl-adenosine
  modified_base 85: mod_base = OTHER; note = 2'-O-Methyl-cytidine
  modified_base 86: mod_base = OTHER; note = 2'-O-Methyl-cytidine
  modified_base 87: mod_base = OTHER; note = 2'-O-Methyl-guanosine
  modified_base 89: mod_base = OTHER; note = 2'-O-Methyl-guanosine
  modified_base 91: mod_base = OTHER; note = 2'-O-Methyl-cytidine
  modified_base 92: mod_base = OTHER; note = 2'-O-Methyl-guanosine
  modified_base 93: mod_base = OTHER; note = 2'-O-Methyl-guanosine
  modified_base 94: mod_base = OTHER; note = 2'-O-Methyl-uridine
  modified_base 95: mod_base = OTHER; note = 2'-O-Methyl-guanosine
  modified_base 96: mod_base = OTHER; note = 2'-O-Methyl-cytidine
  modified_base 97: mod_base = OTHER; note = 2'-O-Methyl-uridine phosphorothioate
  modified_base 98: mod_base = OTHER; note = 2'-O-Methyl-uridine phosphorothioate
  modified_base 99: mod_base = OTHER; note = 2'-O-Methyl-uridine phosphorothioate
  modified_base 100: mod_base = OTHER; note = 2'-O-Methyl-uridine
  misc_difference 101: note = a, c, g, inosine, u, deoxyadenosine, deoxyguanosine, deoxycytidine, deoxyinosine, thymine, ribonebularine, 2'-O-methylnebularine, or 2'-deoxynebularine
  misc_difference 102: note = a, c, g, inosine, u, deoxyadenosine, deoxyguanosine, deoxycytidine, deoxyinosine, thymine, ribonebularine, 2'-O-methylnebularine, or 2'-deoxynebularine
  misc_difference 103: note = a, c, g, inosine, u, deoxyadenosine, deoxyguanosine, deoxycytidine, deoxyinosine, thymine, ribonebularine, 2'-O-methylnebularine, or 2'-deoxynebularine

SEQ ID NO: 2870 - RNA, 103 nt, synthetic construct; identical to SEQ ID NO: 1797
  source 1..103: mol_type = other RNA
  modified_base 1: mod_base = OTHER; note = 2'-O-Methyl-cytidine phosphorothioate
  modified_base 2: mod_base = OTHER; note = 2'-O-Methyl-adenosine phosphorothioate
  modified_base 3: mod_base = OTHER; note = 2'-O-Methyl-guanosine
  modified_base 21: mod_base = OTHER; note = 2'-O-Methyl-guanosine
  modified_base 28: mod_base = OTHER; note = 2'-O-Methyl-adenosine
  modified_base 29: mod_base = OTHER; note = 2'-O-Methyl-guanosine
  modified_base 30: mod_base = OTHER; note = 2'-O-Methyl-cytidine
  modified_base 31: mod_base = OTHER; note = 2'-O-Methyl-uridine
  modified_base 32: mod_base = OTHER; note = 2'-O-Methyl-adenosine
  modified_base 34: mod_base = OTHER; note = 2'-O-Methyl-adenosine
  modified_base 35: mod_base = OTHER; note = 2'-O-Methyl-adenosine
  modified_base 36: mod_base = OTHER; note = 2'-O-Methyl-adenosine
  modified_base 37: mod_base = OTHER; note = 2'-O-Methyl-uridine
  modified_base 38: mod_base = OTHER; note = 2'-O-Methyl-adenosine
  modified_base 39: mod_base = OTHER; note = 2'-O-Methyl-guanosine
  modified_base 40: mod_base = OTHER; note = 2'-O-Methyl-cytidine
  modified_base 41: mod_base = OTHER; note = 2'-O-Methyl-adenosine
  modified_base 42: mod_base = OTHER; note = 2'-O-Methyl-adenosine
  modified_base 46: mod_base = OTHER; note = 2'-O-Methyl-adenosine
  modified_base 48: mod_base = OTHER; note = 2'-O-Methyl-adenosine
  modified_base 50: mod_base = OTHER; note = 2'-O-Methyl-uridine
  modified_base 52: mod_base = OTHER; note = 2'-O-Methyl-adenosine
  modified_base 53: mod_base = OTHER; note = 2'-O-Methyl-guanosine
  modified_base 54: mod_base = OTHER; note = 2'-O-Methyl-guanosine
  modified_base 55: mod_base = OTHER; note = 2'-O-Methyl-cytidine
  modified_base 56: mod_base = OTHER; note = 2'-O-Methyl-uridine
  modified_base 57: mod_base = OTHER; note = 2'-O-Methyl-adenosine
  modified_base 60: mod_base = OTHER; note = 2'-O-Methyl-cytidine
  modified_base 61: mod_base = OTHER; note = 2'-O-Methyl-cytidine
  modified_base 64: mod_base = OTHER; note = uridine phosphorothioate
  modified_base 66: mod_base = OTHER; note = 2'-O-Methyl-uridine
  modified_base 67: mod_base = OTHER; note = 2'-O-Methyl-cytidine
  modified_base 70: mod_base = OTHER; note = 2'-O-Methyl-cytidine
  modified_base 71: mod_base = OTHER; note = 2'-O-Methyl-uridine
  modified_base 72: mod_base = OTHER; note = 2'-O-Methyl-uridine
  modified_base 74: mod_base = OTHER; note = 2'-O-Methyl-adenosine
  modified_base 75: mod_base = OTHER; note = 2'-O-Methyl-adenosine
  modified_base 76: mod_base = OTHER; note = 2'-O-Methyl-adenosine
  modified_base 77: mod_base = OTHER; note = 2'-O-Methyl-adenosine
  modified_base 78: mod_base = OTHER; note = 2'-O-Methyl-adenosine
  modified_base 79: mod_base = OTHER; note = 2'-O-Methyl-guanosine
  modified_base 80: mod_base = OTHER; note = 2'-O-Methyl-uridine
  modified_base 82: mod_base = OTHER; note = 2'-O-Methyl-guanosine
  modified_base 83: mod_base = OTHER; note = 2'-O-Methyl-cytidine
  modified_base 84: mod_base = OTHER; note = 2'-O-Methyl-adenosine
  modified_base 85: mod_base = OTHER; note = 2'-O-Methyl-cytidine
  modified_base 86: mod_base = OTHER; note = 2'-O-Methyl-cytidine
  modified_base 87: mod_base = OTHER; note = 2'-O-Methyl-guanosine
  modified_base 89: mod_base = OTHER; note = 2'-O-Methyl-guanosine
  modified_base 92: mod_base = OTHER; note = 2'-O-Methyl-guanosine
  modified_base 93: mod_base = OTHER; note = 2'-O-Methyl-guanosine
  modified_base 94: mod_base = OTHER; note = 2'-O-Methyl-uridine
  modified_base 95: mod_base = OTHER; note = 2'-O-Methyl-guanosine
  modified_base 96: mod_base = OTHER; note = 2'-O-Methyl-cytidine
  modified_base 97: mod_base = OTHER; note = 2'-O-Methyl-uridine phosphorothioate
  modified_base 98: mod_base = OTHER; note = 2'-O-Methyl-uridine phosphorothioate
  modified_base 99: mod_base = OTHER; note = 2'-O-Methyl-uridine phosphorothioate
  modified_base 100: mod_base = OTHER; note = 2'-O-Methyl-uridine
  misc_difference 101: note = a, c, g, inosine, u, deoxyadenosine, deoxyguanosine, deoxycytidine, deoxyinosine, thymine, ribonebularine, 2'-O-methylnebularine, or 2'-deoxynebularine
  misc_difference 102: note = a, c, g, inosine, u, deoxyadenosine, deoxyguanosine, deoxycytidine, deoxyinosine, thymine, ribonebularine, 2'-O-methylnebularine, or 2'-deoxynebularine
  misc_difference 103: note = a, c, g, inosine, u, deoxyadenosine, deoxyguanosine, deoxycytidine, deoxyinosine, thymine, ribonebularine, 2'-O-methylnebularine, or 2'-deoxynebularine

SEQ ID NO: 2871 - RNA, 103 nt, synthetic construct; identical to SEQ ID NO: 1795
  source 1..103: mol_type = other RNA
  modified_base 1: mod_base = OTHER; note = 2'-O-Methyl-cytidine phosphorothioate
  modified_base 2: mod_base = OTHER; note = 2'-O-Methyl-cytidine phosphorothioate
  modified_base 3: mod_base = OTHER; note = 2'-O-Methyl-cytidine
  modified_base 21: mod_base = OTHER; note = 2'-O-Methyl-guanosine
  modified_base 28: mod_base = OTHER; note = 2'-O-Methyl-adenosine
  modified_base 29: mod_base = OTHER; note = 2'-O-Methyl-guanosine
  modified_base 30: mod_base = OTHER; note = 2'-O-Methyl-cytidine
  modified_base 31: mod_base = OTHER; note = 2'-O-Methyl-uridine
  modified_base 32: mod_base = OTHER; note = 2'-O-Methyl-adenosine
  modified_base 33: mod_base = OTHER; note = 2'-O-Methyl-guanosine
  modified_base 34: mod_base = OTHER; note = 2'-O-Methyl-adenosine
  modified_base 35: mod_base = OTHER; note = 2'-O-Methyl-adenosine
  modified_base 36: mod_base = OTHER; note = 2'-O-Methyl-adenosine
  modified_base 37: mod_base = OTHER; note = 2'-O-Methyl-uridine
  modified_base 38: mod_base = OTHER; note = 2'-O-Methyl-adenosine
  modified_base 39: mod_base = OTHER; note = 2'-O-Methyl-guanosine
  modified_base 40: mod_base = OTHER; note = 2'-O-Methyl-cytidine
  modified_base 41: mod_base = OTHER; note = 2'-O-Methyl-adenosine
  modified_base 42: mod_base = OTHER; note = 2'-O-Methyl-adenosine
  modified_base 45: mod_base = OTHER; note = uridine phosphorothioate
  modified_base 46: mod_base = OTHER; note = 2'-O-Methyl-adenosine
  modified_base 48: mod_base = OTHER; note = 2'-O-Methyl-adenosine
  modified_base 50: mod_base = OTHER; note = 2'-O-Methyl-uridine
  modified_base 52: mod_base = OTHER; note = 2'-O-Methyl-adenosine
  modified_base 53: mod_base = OTHER; note = 2'-O-Methyl-guanosine
  modified_base 54: mod_base = OTHER; note = 2'-O-Methyl-guanosine
  modified_base 55: mod_base = OTHER; note = 2'-O-Methyl-cytidine
  modified_base 56: mod_base = OTHER; note = 2'-O-Methyl-uridine
  modified_base 57: mod_base = OTHER; note = 2'-O-Methyl-adenosine
  modified_base 60: mod_base = OTHER; note = 2'-O-Methyl-cytidine
  modified_base 61: mod_base = OTHER; note = 2'-O-Methyl-cytidine
  modified_base 66: mod_base = OTHER; note = 2'-O-Methyl-uridine
  modified_base 67: mod_base = OTHER; note = 2'-O-Methyl-cytidine
  modified_base 70: mod_base = OTHER; note = 2'-O-Methyl-cytidine
  modified_base 71: mod_base = OTHER; note = 2'-O-Methyl-uridine
  modified_base 72: mod_base = OTHER; note = 2'-O-Methyl-uridine
  modified_base 73: mod_base = OTHER; note = 2'-O-Methyl-guanosine
  modified_base 74: mod_base = OTHER; note = 2'-O-Methyl-adenosine
  modified_base 75: mod_base = OTHER; note = 2'-O-Methyl-adenosine
  modified_base 76: mod_base = OTHER; note = 2'-O-Methyl-adenosine
  modified_base 77: mod_base = OTHER; note = 2'-O-Methyl-adenosine
  modified_base 78: mod_base = OTHER; note = 2'-O-Methyl-adenosine
  modified_base 79: mod_base = OTHER; note = 2'-O-Methyl-guanosine
  modified_base 80: mod_base = OTHER; note = 2'-O-Methyl-uridine
  modified_base 81: mod_base = OTHER; note = 2'-O-Methyl-guanosine
  modified_base 83: mod_base = OTHER; note = 2'-O-Methyl-cytidine
  modified_base 84: mod_base = OTHER; note = 2'-O-Methyl-adenosine
  modified_base 85: mod_base = OTHER; note = 2'-O-Methyl-cytidine
  modified_base 86: mod_base = OTHER; note = 2'-O-Methyl-cytidine
  modified_base 87: mod_base = OTHER; note = 2'-O-Methyl-guanosine
  modified_base 88: mod_base = OTHER; note = 2'-O-Methyl-adenosine
  modified_base 89: mod_base = OTHER; note = 2'-O-Methyl-guanosine
  modified_base 90: mod_base = OTHER; note = 2'-O-Methyl-uridine
  modified_base 91: mod_base = OTHER; note = 2'-O-Methyl-cytidine
  modified_base 92: mod_base = OTHER; note = 2'-O-Methyl-guanosine
  modified_base 93: mod_base = OTHER; note = 2'-O-Methyl-guanosine
  modified_base 94: mod_base = OTHER; note = 2'-O-Methyl-uridine
  modified_base 95: mod_base = OTHER; note = 2'-O-Methyl-guanosine
  modified_base 96: mod_base = OTHER; note = 2'-O-Methyl-cytidine
  modified_base 97: mod_base = OTHER; note = 2'-O-Methyl-uridine phosphorothioate
  modified_base 98: mod_base = OTHER; note = 2'-O-Methyl-uridine phosphorothioate
  modified_base 99: mod_base = OTHER; note = 2'-O-Methyl-uridine phosphorothioate
  modified_base 100: mod_base = OTHER; note = 2'-O-Methyl-uridine
  misc_difference 101: note = a, c, g, inosine, u, deoxyadenosine, deoxyguanosine, deoxycytidine, deoxyinosine, thymine, ribonebularine, 2'-O-methylnebularine, or 2'-deoxynebularine
  misc_difference 102: note = a, c, g, inosine, u, deoxyadenosine, deoxyguanosine, deoxycytidine, deoxyinosine, thymine, ribonebularine, 2'-O-methylnebularine, or 2'-deoxynebularine
  misc_difference 103: note = a, c, g, inosine, u, deoxyadenosine, deoxyguanosine, deoxycytidine, deoxyinosine, thymine, ribonebularine, 2'-O-methylnebularine, or 2'-deoxynebularine

SEQ ID NO: 2872 - RNA, 103 nt, synthetic construct; identical to SEQ ID NO: 1795
  source 1..103: mol_type = other RNA
  modified_base 1: mod_base = OTHER; note = 2'-O-Methyl-cytidine phosphorothioate
  modified_base 2: mod_base = OTHER; note = 2'-O-Methyl-cytidine phosphorothioate
  modified_base 3: mod_base = OTHER; note = 2'-O-Methyl-cytidine
  modified_base 21: mod_base = OTHER; note = 2'-O-Methyl-guanosine
  modified_base 28: mod_base = OTHER; note = 2'-O-Methyl-adenosine
  modified_base 29: mod_base = OTHER; note = 2'-O-Methyl-guanosine
  modified_base 30: mod_base = OTHER; note = 2'-O-Methyl-cytidine
  modified_base 31: mod_base = OTHER; note = 2'-O-Methyl-uridine
  modified_base 32: mod_base = OTHER; note = 2'-O-Methyl-adenosine
  modified_base 34: mod_base = OTHER; note = 2'-O-Methyl-adenosine
  modified_base 35: mod_base = OTHER; note = 2'-O-Methyl-adenosine
  modified_base 36: mod_base = OTHER; note = 2'-O-Methyl-adenosine
  modified_base 37: mod_base = OTHER; note = 2'-O-Methyl-uridine
  modified_base 38: mod_base = OTHER; note = 2'-O-Methyl-adenosine
  modified_base 39: mod_base = OTHER; note = 2'-O-Methyl-guanosine
  modified_base 40: mod_base = OTHER; note = 2'-O-Methyl-cytidine
  modified_base 41: mod_base = OTHER; note = 2'-O-Methyl-adenosine
  modified_base 42: mod_base = OTHER; note = 2'-O-Methyl-adenosine
  modified_base 45: mod_base = OTHER; note = uridine phosphorothioate
  modified_base 46: mod_base = OTHER; note = 2'-O-Methyl-adenosine
  modified_base 48: mod_base = OTHER; note = 2'-O-Methyl-adenosine
  modified_base 50: mod_base = OTHER; note = 2'-O-Methyl-uridine
  modified_base 52: mod_base = OTHER; note = 2'-O-Methyl-adenosine
  modified_base 53: mod_base = OTHER; note = 2'-O-Methyl-guanosine
  modified_base 54: mod_base = OTHER; note = 2'-O-Methyl-guanosine
  modified_base 55: mod_base = OTHER; note = 2'-O-Methyl-cytidine
  modified_base 56: mod_base = OTHER; note = 2'-O-Methyl-uridine
  modified_base 57: mod_base = OTHER; note = 2'-O-Methyl-adenosine
  modified_base 60: mod_base = OTHER; note = 2'-O-Methyl-cytidine
  modified_base 61: mod_base = OTHER; note = 2'-O-Methyl-cytidine
  modified_base 66: mod_base = OTHER; note = 2'-O-Methyl-uridine
  modified_base 67: mod_base = OTHER; note = 2'-O-Methyl-cytidine
  modified_base 70: mod_base = OTHER; note = 2'-O-Methyl-cytidine
  modified_base 71: mod_base = OTHER; note = 2'-O-Methyl-uridine
  modified_base 72: mod_base = OTHER; note = 2'-O-Methyl-uridine
  modified_base 74: mod_base = OTHER; note = 2'-O-Methyl-adenosine
  modified_base 75: mod_base = OTHER; note = 2'-O-Methyl-adenosine
  modified_base 76: mod_base = OTHER; note = 2'-O-Methyl-adenosine
  modified_base 77: mod_base = OTHER; note = 2'-O-Methyl-adenosine
  modified_base 78: mod_base = OTHER; note = 2'-O-Methyl-adenosine
  modified_base 79: mod_base = OTHER; note = 2'-O-Methyl-guanosine
  modified_base 80: mod_base = OTHER; note = 2'-O-Methyl-uridine
  modified_base 81: mod_base = OTHER; note = 2'-O-Methyl-guanosine
  modified_base 83: mod_base = OTHER; note = 2'-O-Methyl-cytidine
  modified_base 84: mod_base = OTHER; note = 2'-O-Methyl-adenosine
  modified_base 85: mod_base = OTHER; note = 2'-O-Methyl-cytidine
  modified_base 86: mod_base = OTHER; note = 2'-O-Methyl-cytidine
  modified_base 87: mod_base = OTHER; note = 2'-O-Methyl-guanosine
  modified_base 88: mod_base = OTHER; note = 2'-O-Methyl-adenosine
  modified_base 89: mod_base = OTHER; note = 2'-O-Methyl-guanosine
  modified_base 90: mod_base = OTHER; note = 2'-O-Methyl-uridine
  modified_base 91: mod_base = OTHER; note = 2'-O-Methyl-cytidine
  modified_base 92: mod_base = OTHER; note = 2'-O-Methyl-guanosine
  modified_base 93: mod_base = OTHER; note = 2'-O-Methyl-guanosine
  modified_base 94: mod_base = OTHER; note = 2'-O-Methyl-uridine
  modified_base 95: mod_base = OTHER; note = 2'-O-Methyl-guanosine
  modified_base 96: mod_base = OTHER; note = 2'-O-Methyl-cytidine
  modified_base 97: mod_base = OTHER; note = 2'-O-Methyl-uridine phosphorothioate
  modified_base 98: mod_base = OTHER; note = 2'-O-Methyl-uridine phosphorothioate
  modified_base 99: mod_base = OTHER; note = 2'-O-Methyl-uridine phosphorothioate
  modified_base 100: mod_base = OTHER; note = 2'-O-Methyl-uridine
  misc_difference 101: note = a, c, g, inosine, u, deoxyadenosine, deoxyguanosine, deoxycytidine, deoxyinosine, thymine, ribonebularine, 2'-O-methylnebularine, or 2'-deoxynebularine
  misc_difference 102: note = a, c, g, inosine, u, deoxyadenosine, deoxyguanosine, deoxycytidine, deoxyinosine, thymine, ribonebularine, 2'-O-methylnebularine, or 2'-deoxynebularine
  misc_difference 103: note = a, c, g, inosine, u, deoxyadenosine, deoxyguanosine, deoxycytidine, deoxyinosine, thymine, ribonebularine, 2'-O-methylnebularine, or 2'-deoxynebularine

SEQ ID NO: 2873 - RNA, 103 nt, synthetic construct; identical to SEQ ID NO: 1796
  source 1..103: mol_type = other RNA
  modified_base 1: mod_base = OTHER; note = 2'-O-Methyl-guanosine phosphorothioate
  modified_base 2: mod_base = OTHER; note = 2'-O-Methyl-adenosine phosphorothioate
  modified_base 3: mod_base = OTHER; note = 2'-O-Methyl-guanosine
  modified_base 21: mod_base = OTHER; note = 2'-O-Methyl-guanosine
  modified_base 28: mod_base = OTHER; note = 2'-O-Methyl-adenosine
  modified_base 29: mod_base = OTHER; note = 2'-O-Methyl-guanosine
  modified_base 30: mod_base = OTHER; note = 2'-O-Methyl-cytidine
  modified_base 31: mod_base = OTHER; note = 2'-O-Methyl-uridine
  modified_base 32: mod_base = OTHER; note = 2'-O-Methyl-adenosine
  modified_base 33: mod_base = OTHER; note = 2'-O-Methyl-guanosine
  modified_base 34: mod_base = OTHER; note = 2'-O-Methyl-adenosine
  modified_base 35: mod_base = OTHER; note = 2'-O-Methyl-adenosine
  modified_base 36: mod_base = OTHER; note = 2'-O-Methyl-adenosine
  modified_base 37: mod_base = OTHER; note = 2'-O-Methyl-uridine
  modified_base 38: mod_base = OTHER; note = 2'-O-Methyl-adenosine
  modified_base 39: mod_base = OTHER; note = 2'-O-Methyl-guanosine
  modified_base 40: mod_base = OTHER; note = 2'-O-Methyl-cytidine
  modified_base 41: mod_base = OTHER; note = 2'-O-Methyl-adenosine
  modified_base 42: mod_base = OTHER; note = 2'-O-Methyl-adenosine
  modified_base 45: mod_base = OTHER; note = uridine phosphorothioate
  modified_base 46: mod_base = OTHER; note = 2'-O-Methyl-adenosine
  modified_base 48: mod_base = OTHER; note = 2'-O-Methyl-adenosine
  modified_base 50: mod_base = OTHER; note = 2'-O-Methyl-uridine
  modified_base 52: mod_base = OTHER; note = 2'-O-Methyl-adenosine
  modified_base 53: mod_base = OTHER; note = 2'-O-Methyl-guanosine
  modified_base 54: mod_base = OTHER; note = 2'-O-Methyl-guanosine
  modified_base 55: mod_base = OTHER; note = 2'-O-Methyl-cytidine
  modified_base 56: mod_base = OTHER; note = 2'-O-Methyl-uridine
  modified_base 57: mod_base = OTHER; note = 2'-O-Methyl-adenosine
  modified_base 60: mod_base = OTHER; note = 2'-O-Methyl-cytidine
  modified_base 61: mod_base = OTHER; note = 2'-O-Methyl-cytidine
  modified_base 66: mod_base = OTHER; note = 2'-O-Methyl-uridine
  modified_base 67: mod_base = OTHER; note = 2'-O-Methyl-cytidine
  modified_base 70: mod_base = OTHER; note = 2'-O-Methyl-cytidine
  modified_base 71: mod_base = OTHER; note = 2'-O-Methyl-uridine
  modified_base 72: mod_base = OTHER; note = 2'-O-Methyl-uridine
  modified_base 73: mod_base = OTHER; note = 2'-O-Methyl-guanosine
  modified_base 74: mod_base = OTHER; note = 2'-O-Methyl-adenosine
  modified_base 75: mod_base = OTHER; note = 2'-O-Methyl-adenosine
  modified_base 76: mod_base = OTHER; note = 2'-O-Methyl-adenosine
  modified_base 77: mod_base = OTHER; note = 2'-O-Methyl-adenosine
  modified_base 78: mod_base = OTHER; note = 2'-O-Methyl-adenosine
  modified_base 79: mod_base = OTHER; note = 2'-O-Methyl-guanosine
  modified_base 80: mod_base = OTHER; note = 2'-O-Methyl-uridine
  modified_base 81: mod_base = OTHER; note = 2'-O-Methyl-guanosine
  modified_base 83: mod_base = OTHER; note = 2'-O-Methyl-cytidine
  modified_base 84: mod_base = OTHER; note = 2'-O-Methyl-adenosine
  modified_base 85: mod_base = OTHER; note = 2'-O-Methyl-cytidine
  modified_base 86: mod_base = OTHER; note = 2'-O-Methyl-cytidine
  modified_base 87: mod_base = OTHER; note = 2'-O-Methyl-guanosine
  modified_base 88: mod_base = OTHER; note = 2'-O-Methyl-adenosine
  modified_base 89: mod_base = OTHER; note = 2'-O-Methyl-guanosine
  modified_base 90: mod_base = OTHER; note = 2'-O-Methyl-uridine
  modified_base 91: mod_base = OTHER; note = 2'-O-Methyl-cytidine
  modified_base 92: mod_base = OTHER; note = 2'-O-Methyl-guanosine
  modified_base 93: mod_base = OTHER; note = 2'-O-Methyl-guanosine
  modified_base 94: mod_base = OTHER; note = 2'-O-Methyl-uridine
  modified_base 95: mod_base = OTHER; note = 2'-O-Methyl-guanosine
  modified_base 96: mod_base = OTHER; note = 2'-O-Methyl-cytidine
  modified_base 97: mod_base = OTHER; note = 2'-O-Methyl-uridine phosphorothioate
  modified_base 98: mod_base = OTHER; note = 2'-O-Methyl-uridine phosphorothioate
  modified_base 99: mod_base = OTHER; note = 2'-O-Methyl-uridine phosphorothioate
  modified_base 100: mod_base = OTHER; note = 2'-O-Methyl-uridine
  misc_difference 101: note = a, c, g, inosine, u, deoxyadenosine, deoxyguanosine, deoxycytidine, deoxyinosine, thymine, ribonebularine, 2'-O-methylnebularine, or 2'-deoxynebularine
  misc_difference 102: note = a, c, g, inosine, u, deoxyadenosine, deoxyguanosine, deoxycytidine, deoxyinosine, thymine, ribonebularine, 2'-O-methylnebularine, or 2'-deoxynebularine
  misc_difference 103: note = a, c, g, inosine, u, deoxyadenosine, deoxyguanosine, deoxycytidine, deoxyinosine, thymine, ribonebularine, 2'-O-methylnebularine, or 2'-deoxynebularine

SEQ ID NO: 2874 - RNA, 103 nt, synthetic construct; identical to SEQ ID NO: 1796
  source 1..103: mol_type = other RNA
  modified_base 1: mod_base = OTHER; note = 2'-O-Methyl-guanosine phosphorothioate
  modified_base 2: mod_base = OTHER; note = 2'-O-Methyl-adenosine phosphorothioate
  modified_base 3: mod_base = OTHER; note = 2'-O-Methyl-guanosine
  modified_base 21: mod_base = OTHER; note = 2'-O-Methyl-guanosine
  modified_base 28: mod_base = OTHER; note = 2'-O-Methyl-adenosine
  modified_base 29: mod_base = OTHER; note = 2'-O-Methyl-guanosine
  modified_base 30: mod_base = OTHER; note = 2'-O-Methyl-cytidine
  modified_base 31: mod_base = OTHER; note = 2'-O-Methyl-uridine
  modified_base 32: mod_base = OTHER; note = 2'-O-Methyl-adenosine
  modified_base 34: mod_base = OTHER; note = 2'-O-Methyl-adenosine
  modified_base 35: mod_base = OTHER; note = 2'-O-Methyl-adenosine
  modified_base 36: mod_base = OTHER; note = 2'-O-Methyl-adenosine
  modified_base 37: mod_base = OTHER; note = 2'-O-Methyl-uridine
  modified_base 38: mod_base = OTHER; note = 2'-O-Methyl-adenosine
  modified_base 39: mod_base = OTHER; note = 2'-O-Methyl-guanosine
  modified_base 40: mod_base = OTHER; note = 2'-O-Methyl-cytidine
  modified_base 41: mod_base = OTHER; note = 2'-O-Methyl-adenosine
  modified_base 42: mod_base = OTHER; note = 2'-O-Methyl-adenosine
  modified_base 45: mod_base = OTHER; note = uridine phosphorothioate
  modified_base 46: mod_base = OTHER; note = 2'-O-Methyl-adenosine
  modified_base 48: mod_base = OTHER; note = 2'-O-Methyl-adenosine
  modified_base 50: mod_base = OTHER; note = 2'-O-Methyl-uridine
  modified_base 52: mod_base = OTHER; note = 2'-O-Methyl-adenosine
  modified_base 53: mod_base = OTHER; note = 2'-O-Methyl-guanosine
  modified_base 54: mod_base = OTHER; note = 2'-O-Methyl-guanosine
  modified_base 55: mod_base = OTHER; note = 2'-O-Methyl-cytidine
  modified_base 56: mod_base = OTHER; note = 2'-O-Methyl-uridine
  modified_base 57: mod_base = OTHER; note = 2'-O-Methyl-adenosine
  modified_base 60: mod_base = OTHER; note = 2'-O-Methyl-cytidine
  modified_base 61: mod_base = OTHER; note = 2'-O-Methyl-cytidine
  modified_base 66: mod_base = OTHER; note = 2'-O-Methyl-uridine
  modified_base 67: mod_base = OTHER; note = 2'-O-Methyl-cytidine
  modified_base 70: mod_base = OTHER; note = 2'-O-Methyl-cytidine
  modified_base 71: mod_base = OTHER; note = 2'-O-Methyl-uridine
  modified_base 72: mod_base = OTHER; note = 2'-O-Methyl-uridine
  modified_base 74: mod_base = OTHER; note = 2'-O-Methyl-adenosine
  modified_base 75: mod_base = OTHER; note = 2'-O-Methyl-adenosine
  modified_base 76: mod_base = OTHER; note = 2'-O-Methyl-adenosine
  modified_base 77: mod_base = OTHER; note = 2'-O-Methyl-adenosine
  modified_base 78: mod_base = OTHER; note = 2'-O-Methyl-adenosine
  modified_base 79: mod_base = OTHER; note = 2'-O-Methyl-guanosine
  modified_base 80: mod_base = OTHER; note = 2'-O-Methyl-uridine
  modified_base 81: mod_base = OTHER; note = 2'-O-Methyl-guanosine
  modified_base 83: mod_base = OTHER; note = 2'-O-Methyl-cytidine
  modified_base 84: mod_base = OTHER; note = 2'-O-Methyl-adenosine
  modified_base 85: mod_base = OTHER; note = 2'-O-Methyl-cytidine
  modified_base 86: mod_base = OTHER; note = 2'-O-Methyl-cytidine
  modified_base 87: mod_base = OTHER; note = 2'-O-Methyl-guanosine
  modified_base 88: mod_base = OTHER; note = 2'-O-Methyl-adenosine
  modified_base 89: mod_base = OTHER; note = 2'-O-Methyl-guanosine
  modified_base 90: mod_base = OTHER; note = 2'-O-Methyl-uridine
  modified_base 91: mod_base = OTHER; note = 2'-O-Methyl-cytidine
  modified_base 92: mod_base = OTHER; note = 2'-O-Methyl-guanosine
  modified_base 93: mod_base = OTHER; note = 2'-O-Methyl-guanosine
  modified_base 94: mod_base = OTHER; note = 2'-O-Methyl-uridine
  modified_base 95: mod_base = OTHER; note = 2'-O-Methyl-guanosine
  modified_base 96: mod_base = OTHER; note = 2'-O-Methyl-cytidine
  modified_base 97: mod_base = OTHER; note = 2'-O-Methyl-uridine phosphorothioate
  modified_base 98: mod_base = OTHER; note = 2'-O-Methyl-uridine phosphorothioate
  modified_base 99: mod_base = OTHER; note = 2'-O-Methyl-uridine phosphorothioate
  modified_base 100: mod_base = OTHER; note = 2'-O-Methyl-uridine
  misc_difference 101: note = a, c, g, inosine, u, deoxyadenosine, deoxyguanosine, deoxycytidine, deoxyinosine, thymine, ribonebularine, 2'-O-methylnebularine, or 2'-deoxynebularine
  misc_difference 102: note = a, c, g, inosine, u, deoxyadenosine, deoxyguanosine, deoxycytidine, deoxyinosine, thymine, ribonebularine, 2'-O-methylnebularine, or 2'-deoxynebularine
  misc_difference 103: note = a, c, g, inosine, u, deoxyadenosine, deoxyguanosine, deoxycytidine, deoxyinosine, thymine, ribonebularine, 2'-O-methylnebularine, or 2'-deoxynebularine

SEQ ID NO: 2875 - RNA, 103 nt, synthetic construct; identical to SEQ ID NO: 1797
  source 1..103: mol_type = other RNA
  modified_base 1: mod_base = OTHER; note = 2'-O-Methyl-cytidine phosphorothioate
  modified_base 2: mod_base = OTHER; note = 2'-O-Methyl-adenosine phosphorothioate
  modified_base 3: mod_base = OTHER; note = 2'-O-Methyl-guanosine
  modified_base 21: mod_base = OTHER; note = 2'-O-Methyl-guanosine
  modified_base 28: mod_base = OTHER; note = 2'-O-Methyl-adenosine
  modified_base 29: mod_base = OTHER; note = 2'-O-Methyl-guanosine
  modified_base 30: mod_base = OTHER; note = 2'-O-Methyl-cytidine
  modified_base 31: mod_base = OTHER; note = 2'-O-Methyl-uridine
  modified_base 32: mod_base = OTHER; note = 2'-O-Methyl-adenosine
  modified_base 33: mod_base = OTHER; note = 2'-O-Methyl-guanosine
  modified_base 34: mod_base = OTHER; note = 2'-O-Methyl-adenosine
  modified_base 35: mod_base = OTHER; note = 2'-O-Methyl-adenosine
  modified_base 36: mod_base = OTHER; note = 2'-O-Methyl-adenosine
  modified_base 37: mod_base = OTHER; note = 2'-O-Methyl-uridine
  modified_base 38: mod_base = OTHER; note = 2'-O-Methyl-adenosine
  modified_base 39: mod_base = OTHER; note = 2'-O-Methyl-guanosine
  modified_base 40: mod_base = OTHER; note = 2'-O-Methyl-cytidine
  modified_base 41: mod_base = OTHER; note = 2'-O-Methyl-adenosine
  modified_base 42: mod_base = OTHER; note = 2'-O-Methyl-adenosine
  modified_base 45: mod_base = OTHER; note = uridine phosphorothioate
  modified_base 46: mod_base = OTHER; note = 2'-O-Methyl-adenosine
  modified_base 48: mod_base = OTHER; note = 2'-O-Methyl-adenosine
  modified_base 50: mod_base = OTHER; note = 2'-O-Methyl-uridine
  modified_base 52: mod_base = OTHER; note = 2'-O-Methyl-adenosine
  modified_base 53: mod_base = OTHER; note = 2'-O-Methyl-guanosine
  modified_base 54: mod_base = OTHER; note = 2'-O-Methyl-guanosine
  modified_base 57: mod_base = OTHER; note = 2'-O-Methyl-adenosine
  modified_base 61: mod_base = OTHER; note = 2'-O-Methyl-cytidine
  modified_base 66: mod_base = OTHER; note = 2'-O-Methyl-uridine
  modified_base 67: mod_base = OTHER; note = 2'-O-Methyl-cytidine
  modified_base 70: mod_base = OTHER; note = 2'-O-Methyl-cytidine
  modified_base 71: mod_base = OTHER; note = 2'-O-Methyl-uridine
  modified_base 72: mod_base = OTHER; note = 2'-O-Methyl-uridine
  modified_base 74: mod_base = OTHER; note = 2'-O-Methyl-adenosine
  modified_base 75: mod_base = OTHER; note = 2'-O-Methyl-adenosine
  modified_base 76: mod_base = OTHER; note = 2'-O-Methyl-adenosine
  modified_base 77: mod_base = OTHER; note = 2'-O-Methyl-adenosine
  modified_base 78: mod_base = OTHER; note = 2'-O-Methyl-adenosine
  modified_base 79: mod_base = OTHER; note = 2'-O-Methyl-guanosine
  modified_base 80: mod_base = OTHER; note = 2'-O-Methyl-uridine
  modified_base 82: mod_base = OTHER; note = 2'-O-Methyl-guanosine
  modified_base 83: mod_base = OTHER; note = 2'-O-Methyl-cytidine
  modified_base 84: mod_base = OTHER; note = 2'-O-Methyl-adenosine
  modified_base 85: mod_base = OTHER; note = 2'-O-Methyl-cytidine
  modified_base 86: mod_base = OTHER; note = 2'-O-Methyl-cytidine
  modified_base 87: mod_base = OTHER; note = 2'-O-Methyl-guanosine
  modified_base 89: mod_base = OTHER; note = 2'-O-Methyl-guanosine
  modified_base 92: mod_base = OTHER; note = 2'-O-Methyl-guanosine
  modified_base 93: mod_base = OTHER; note = 2'-O-Methyl-guanosine
  modified_base 94: mod_base = OTHER; note = 2'-O-Methyl-uridine
  modified_base 95: mod_base = OTHER; note = 2'-O-Methyl-guanosine
  modified_base 96: mod_base = OTHER; note = 2'-O-Methyl-cytidine
  modified_base 97: mod_base = OTHER; note = 2'-O-Methyl-uridine phosphorothioate
  modified_base 98: mod_base = OTHER; note = 2'-O-Methyl-uridine phosphorothioate
  modified_base 99: mod_base = OTHER; note = 2'-O-Methyl-uridine phosphorothioate
  modified_base 100: mod_base = OTHER; note = 2'-O-Methyl-uridine
  misc_difference 101: note = a, c, g, inosine, u, deoxyadenosine, deoxyguanosine, deoxycytidine, deoxyinosine, thymine, ribonebularine, 2'-O-methylnebularine, or 2'-deoxynebularine
  misc_difference 102: note = a, c, g, inosine, u, deoxyadenosine, deoxyguanosine, deoxycytidine, deoxyinosine, thymine, ribonebularine, 2'-O-methylnebularine, or 2'-deoxynebularine
  misc_difference 103: note = a, c, g, inosine, u, deoxyadenosine, deoxyguanosine, deoxycytidine, deoxyinosine, thymine, ribonebularine, 2'-O-methylnebularine, or 2'-deoxynebularine

SEQ ID NO: 2876 - RNA, 103 nt, synthetic construct; identical to SEQ ID NO: 1797
  source 1..103: mol_type = other RNA
  modified_base 1: mod_base = OTHER; note = 2'-O-Methyl-cytidine phosphorothioate
  modified_base 2: mod_base = OTHER; note = 2'-O-Methyl-adenosine phosphorothioate
  modified_base 3: mod_base = OTHER; note = 2'-O-Methyl-guanosine
  modified_base 21: mod_base = OTHER; note = 2'-O-Methyl-guanosine
  modified_base 28: mod_base = OTHER; note = 2'-O-Methyl-adenosine
  modified_base 29: mod_base = OTHER; note = 2'-O-Methyl-guanosine
  modified_base 30: mod_base = OTHER; note = 2'-O-Methyl-cytidine
  modified_base 31: mod_base = OTHER; note = 2'-O-Methyl-uridine
  modified_base 32: mod_base = OTHER; note = 2'-O-Methyl-adenosine
  modified_base 33: mod_base = OTHER; note = 2'-O-Methyl-guanosine
  modified_base 34: mod_base = OTHER; note = 2'-O-Methyl-adenosine
  modified_base 35: mod_base = OTHER; note = 2'-O-Methyl-adenosine
  modified_base 36: mod_base = OTHER; note = 2'-O-Methyl-adenosine
  modified_base 37: mod_base = OTHER; note = 2'-O-Methyl-uridine
  modified_base 38: mod_base = OTHER; note = 2'-O-Methyl-adenosine
  modified_base 39: mod_base = OTHER; note = 2'-O-Methyl-guanosine
  modified_base 40: mod_base = OTHER; note = 2'-O-Methyl-cytidine
  modified_base 41: mod_base = OTHER; note = 2'-O-Methyl-adenosine
  modified_base 42: mod_base = OTHER; note = 2'-O-Methyl-adenosine
  modified_base 45: mod_base = OTHER; note = uridine phosphorothioate
  modified_base 46: mod_base = OTHER; note = 2'-O-Methyl-adenosine
  modified_base 48: mod_base = OTHER; note = 2'-O-Methyl-adenosine
  modified_base 50: mod_base = OTHER; note = 2'-O-Methyl-uridine
  modified_base 52: mod_base = OTHER; note = 2'-O-Methyl-adenosine
  modified_base 53: mod_base = OTHER; note = 2'-O-Methyl-guanosine
  modified_base 54: mod_base = OTHER; note = 2'-O-Methyl-guanosine
  modified_base 55: mod_base = OTHER; note = 2'-O-Methyl-cytidine
  modified_base 56: mod_base = OTHER; note = 2'-O-Methyl-uridine
  modified_base 57: mod_base = OTHER; note = 2'-O-Methyl-adenosine
  modified_base 60: mod_base = OTHER; note = 2'-O-Methyl-cytidine
  modified_base 61: mod_base = OTHER; note = 2'-O-Methyl-cytidine
  modified_base 66: mod_base = OTHER; note = 2'-O-Methyl-uridine
  modified_base 67: mod_base = OTHER; note = 2'-O-Methyl-cytidine
  modified_base 70: mod_base = OTHER; note = 2'-O-Methyl-cytidine
  modified_base 71: mod_base = OTHER; note = 2'-O-Methyl-uridine
  modified_base 72: mod_base = OTHER; note = 2'-O-Methyl-uridine
  modified_base 74: mod_base = OTHER; note = 2'-O-Methyl-adenosine
  modified_base 75: mod_base = OTHER; note = 2'-O-Methyl-adenosine
  modified_base 76: mod_base = OTHER; note = 2'-O-Methyl-adenosine
  modified_base 77: mod_base = OTHER; note = 2'-O-Methyl-adenosine
  modified_base 78: mod_base = OTHER; note = 2'-O-Methyl-adenosine
  modified_base 79: mod_base = OTHER; note = 2'-O-Methyl-guanosine
  modified_base 80: mod_base = OTHER; note = 2'-O-Methyl-uridine
  modified_base 82: mod_base = OTHER; note = 2'-O-Methyl-guanosine
  modified_base 83: mod_base = OTHER; note = 2'-O-Methyl-cytidine
  modified_base 84: mod_base = OTHER; note = 2'-O-Methyl-adenosine
  modified_base 85: mod_base = OTHER; note = 2'-O-Methyl-cytidine
  modified_base 86: mod_base = OTHER; note = 2'-O-Methyl-cytidine
  modified_base 87: mod_base = OTHER; note = 2'-O-Methyl-guanosine
  modified_base 89: mod_base = OTHER; note = 2'-O-Methyl-guanosine
  modified_base 92: mod_base = OTHER; note = 2'-O-Methyl-guanosine
  modified_base 93: mod_base = OTHER; note = 2'-O-Methyl-guanosine
  modified_base 94: mod_base = OTHER; note = 2'-O-Methyl-uridine
  modified_base 95: mod_base = OTHER; note = 2'-O-Methyl-guanosine
  modified_base 96: mod_base = OTHER; note = 2'-O-Methyl-cytidine
  modified_base 97: mod_base = OTHER; note = 2'-O-Methyl-uridine phosphorothioate
  modified_base 98: mod_base = OTHER; note = 2'-O-Methyl-uridine phosphorothioate
  modified_base 99: mod_base = OTHER; note = 2'-O-Methyl-uridine phosphorothioate
  modified_base 100: mod_base = OTHER; note = 2'-O-Methyl-uridine
  misc_difference 101: note = a, c, g, inosine, u, deoxyadenosine, deoxyguanosine, deoxycytidine, deoxyinosine, thymine, ribonebularine, 2'-O-methylnebularine, or 2'-deoxynebularine
  misc_difference 102: note = a, c, g, inosine, u, deoxyadenosine, deoxyguanosine, deoxycytidine, deoxyinosine, thymine, ribonebularine, 2'-O-methylnebularine, or 2'-deoxynebularine
  misc_difference 103: note = a, c, g, inosine, u, deoxyadenosine, deoxyguanosine, deoxycytidine, deoxyinosine, thymine, ribonebularine, 2'-O-methylnebularine, or 2'-deoxynebularine

SEQ ID NO: 2877 - RNA, 103 nt, synthetic construct; identical to SEQ ID NO: 1797
  source 1..103: mol_type = other RNA
  modified_base 1: mod_base = OTHER; note = 2'-O-Methyl-cytidine phosphorothioate
  modified_base 2: mod_base = OTHER; note = 2'-O-Methyl-adenosine phosphorothioate
  modified_base 3: mod_base = OTHER; note = 2'-O-Methyl-guanosine
  modified_base 21: mod_base = OTHER; note = 2'-O-Methyl-guanosine
  modified_base 28: mod_base = OTHER; note = 2'-O-Methyl-adenosine
  modified_base 29: mod_base = OTHER; note = 2'-O-Methyl-guanosine
  modified_base 30: mod_base = OTHER; note = 2'-O-Methyl-cytidine
  modified_base 31: mod_base = OTHER; note = 2'-O-Methyl-uridine
  modified_base 32: mod_base = OTHER; note = 2'-O-Methyl-adenosine
  modified_base 33: mod_base = OTHER; note = 2'-O-Methyl-guanosine
  modified_base 34: mod_base = OTHER; note = 2'-O-Methyl-adenosine
  modified_base 35: mod_base = OTHER; note = 2'-O-Methyl-adenosine
  modified_base 36: mod_base = OTHER; note = 2'-O-Methyl-adenosine
  modified_base 37: mod_base = OTHER; note = 2'-O-Methyl-uridine
  modified_base 38: mod_base = OTHER; note = 2'-O-Methyl-adenosine
  modified_base 39: mod_base = OTHER; note = 2'-O-Methyl-guanosine
  modified_base 40: mod_base = OTHER; note = 2'-O-Methyl-cytidine
  modified_base 41: mod_base = OTHER; note = 2'-O-Methyl-adenosine
  modified_base 42: mod_base = OTHER; note = 2'-O-Methyl-adenosine
  modified_base 45: mod_base = OTHER; note = uridine phosphorothioate
  modified_base 46: mod_base = OTHER; note = 2'-O-Methyl-adenosine
  modified_base 48: mod_base = OTHER; note = 2'-O-Methyl-adenosine
  modified_base 50: mod_base = OTHER; note = 2'-O-Methyl-uridine
  modified_base 52: mod_base = OTHER; note = 2'-O-Methyl-adenosine
  modified_base 53: mod_base = OTHER; note = 2'-O-Methyl-guanosine
  modified_base 54: mod_base = OTHER; note = 2'-O-Methyl-guanosine
  modified_base 57: mod_base = OTHER; note = 2'-O-Methyl-adenosine
  modified_base 61: mod_base = OTHER; note = 2'-O-Methyl-cytidine
  modified_base 66: mod_base = OTHER; note = 2'-O-Methyl-uridine
  modified_base 67: mod_base = OTHER; note = 2'-O-Methyl-cytidine
  modified_base 70: mod_base = OTHER; note = 2'-O-Methyl-cytidine
  modified_base 71: mod_base = OTHER; note = 2'-O-Methyl-uridine
  modified_base 72: mod_base = OTHER; note = 2'-O-Methyl-uridine
  modified_base 73: mod_base = OTHER; note = 2'-O-Methyl-guanosine
  modified_base 74: mod_base = OTHER; note = 2'-O-Methyl-adenosine
  modified_base 75: mod_base = OTHER; note = 2'-O-Methyl-adenosine
  modified_base 76: mod_base = OTHER; note = 2'-O-Methyl-adenosine
  modified_base 77: mod_base = OTHER; note = 2'-O-Methyl-adenosine
  modified_base 78: mod_base = OTHER; note = 2'-O-Methyl-adenosine
  modified_base 79: mod_base = OTHER; note = 2'-O-Methyl-guanosine
  modified_base 80: mod_base = OTHER; note = 2'-O-Methyl-uridine
  modified_base 82: mod_base = OTHER; note = 2'-O-Methyl-guanosine
  modified_base 83: mod_base = OTHER; note = 2'-O-Methyl-cytidine
  modified_base 84: mod_base = OTHER; note = 2'-O-Methyl-adenosine
  modified_base 85: mod_base = OTHER; note = 2'-O-Methyl-cytidine
  modified_base 86: mod_base = OTHER; note = 2'-O-Methyl-cytidine
  modified_base 87: mod_base = OTHER; note = 2'-O-Methyl-guanosine
  modified_base 89: mod_base = OTHER; note = 2'-O-Methyl-guanosine
  modified_base 92: mod_base = OTHER; note = 2'-O-Methyl-guanosine
  modified_base 93: mod_base = OTHER; note = 2'-O-Methyl-guanosine
  modified_base 94: mod_base = OTHER; note = 2'-O-Methyl-uridine
  modified_base 95: mod_base = OTHER; note = 2'-O-Methyl-guanosine
  modified_base 96: mod_base = OTHER; note = 2'-O-Methyl-cytidine
  modified_base 97: mod_base = OTHER; note = 2'-O-Methyl-uridine phosphorothioate
  modified_base 98: mod_base = OTHER; note = 2'-O-Methyl-uridine phosphorothioate
  modified_base 99: mod_base = OTHER; note = 2'-O-Methyl-uridine phosphorothioate
  modified_base 100: mod_base = OTHER; note = 2'-O-Methyl-uridine
  misc_difference 101: note = a, c, g, inosine, u, deoxyadenosine, deoxyguanosine, deoxycytidine, deoxyinosine, thymine, ribonebularine, 2'-O-methylnebularine, or 2'-deoxynebularine
  misc_difference 102: note = a, c, g, inosine, u, deoxyadenosine, deoxyguanosine, deoxycytidine, deoxyinosine, thymine, ribonebularine, 2'-O-methylnebularine, or 2'-deoxynebularine
  misc_difference 103: note = a, c, g, inosine, u, deoxyadenosine, deoxyguanosine, deoxycytidine, deoxyinosine, thymine, ribonebularine, 2'-O-methylnebularine, or 2'-deoxynebularine

SEQ ID NO: 2878 - RNA, 103 nt, synthetic construct; identical to SEQ ID NO: 1797
  source 1..103: mol_type = other RNA
  modified_base 1: mod_base = OTHER; note = 2'-O-Methyl-cytidine phosphorothioate
  modified_base 2: mod_base = OTHER; note = 2'-O-Methyl-adenosine phosphorothioate
  modified_base 3: mod_base = OTHER; note = 2'-O-Methyl-guanosine
  modified_base 21: mod_base = OTHER; note = 2'-O-Methyl-guanosine
  modified_base 28: mod_base = OTHER; note = 2'-O-Methyl-adenosine
  modified_base 29: mod_base = OTHER; note = 2'-O-Methyl-guanosine
  modified_base 30: mod_base = OTHER; note = 2'-O-Methyl-cytidine
  modified_base 31: mod_base = OTHER; note = 2'-O-Methyl-uridine
  modified_base 32: mod_base = OTHER; note = 2'-O-Methyl-adenosine
  modified_base 33: mod_base = OTHER; note = 2'-O-Methyl-guanosine
  modified_base 34: mod_base = OTHER; note = 2'-O-Methyl-adenosine
  modified_base 35: mod_base = OTHER; note = 2'-O-Methyl-adenosine
  modified_base 36: mod_base = OTHER; note = 2'-O-Methyl-adenosine
  modified_base 37: mod_base = OTHER; note = 2'-O-Methyl-uridine
  modified_base 38: mod_base = OTHER; note = 2'-O-Methyl-adenosine
  modified_base 39: mod_base = OTHER; note = 2'-O-Methyl-guanosine
  modified_base 40: mod_base = OTHER; note = 2'-O-Methyl-cytidine
  modified_base 41: mod_base = OTHER; note = 2'-O-Methyl-adenosine
  modified_base 42: mod_base = OTHER; note = 2'-O-Methyl-adenosine
  modified_base 45: mod_base = OTHER; note = uridine phosphorothioate
  modified_base 46: mod_base = OTHER; note = 2'-O-Methyl-adenosine
  modified_base 48: mod_base = OTHER; note = 2'-O-Methyl-adenosine
  modified_base 50: mod_base = OTHER; note = 2'-O-Methyl-uridine
  modified_base 52: mod_base = OTHER; note = 2'-O-Methyl-adenosine
  modified_base 53: mod_base = OTHER; note = 2'-O-Methyl-guanosine
  modified_base 54: mod_base = OTHER; note = 2'-O-Methyl-guanosine
  modified_base 57: mod_base = OTHER; note = 2'-O-Methyl-adenosine
  modified_base 61: mod_base = OTHER; note = 2'-O-Methyl-cytidine
  modified_base 66: mod_base = OTHER; note = 2'-O-Methyl-uridine
  modified_base 67: mod_base = OTHER; note = 2'-O-Methyl-cytidine
  modified_base 70: mod_base = OTHER; note = 2'-O-Methyl-cytidine
  modified_base 71: mod_base = OTHER; note = 2'-O-Methyl-uridine
  modified_base 72: mod_base = OTHER; note = 2'-O-Methyl-uridine
  modified_base 73: mod_base = OTHER; note = 2'-O-Methyl-guanosine
  modified_base 74: mod_base = OTHER; note = 2'-O-Methyl-adenosine
  modified_base 75: mod_base = OTHER; note = 2'-O-Methyl-adenosine
  modified_base 76: mod_base = OTHER; note = 2'-O-Methyl-adenosine
  modified_base 77: mod_base = OTHER; note = 2'-O-Methyl-adenosine
  modified_base 78: mod_base = OTHER; note = 2'-O-Methyl-adenosine
  modified_base 79: mod_base = OTHER; note = 2'-O-Methyl-guanosine
  modified_base 80: mod_base = OTHER; note = 2'-O-Methyl-uridine
  modified_base 82: mod_base = OTHER; note = 2'-O-Methyl-guanosine
  modified_base 83: mod_base = OTHER; note = 2'-O-Methyl-cytidine
  modified_base 84: mod_base = OTHER; note = 2'-O-Methyl-adenosine
  modified_base 85: mod_base = OTHER; note = 2'-O-Methyl-cytidine
  modified_base 86: mod_base = OTHER; note = 2'-O-Methyl-cytidine
  modified_base 87: mod_base = OTHER; note = 2'-O-Methyl-guanosine
  modified_base 89: mod_base = OTHER; note = 2'-O-Methyl-guanosine
  modified_base 91: mod_base = OTHER; note = 2'-O-Methyl-cytidine
  modified_base 92: mod_base = OTHER; note = 2'-O-Methyl-guanosine
  modified_base 93: mod_base = OTHER; note = 2'-O-Methyl-guanosine
  modified_base 94: mod_base = OTHER; note = 2'-O-Methyl-uridine
  modified_base 95: mod_base = OTHER; note = 2'-O-Methyl-guanosine
  modified_base 96: mod_base = OTHER; note = 2'-O-Methyl-cytidine
  modified_base 97: mod_base = OTHER; note = 2'-O-Methyl-uridine phosphorothioate
  modified_base 98: mod_base = OTHER; note = 2'-O-Methyl-uridine phosphorothioate
  modified_base 99: mod_base = OTHER; note = 2'-O-Methyl-uridine phosphorothioate
  modified_base 100: mod_base = OTHER; note = 2'-O-Methyl-uridine
  misc_difference 101: note = a, c, g, inosine, u, deoxyadenosine, deoxyguanosine, deoxycytidine, deoxyinosine, thymine, ribonebularine, 2'-O-methylnebularine, or 2'-deoxynebularine
  misc_difference 102: note = a, c, g, inosine, u, deoxyadenosine, deoxyguanosine, deoxycytidine, deoxyinosine, thymine, ribonebularine, 2'-O-methylnebularine, or 2'-deoxynebularine
  misc_difference 103: note = a, c, g, inosine, u, deoxyadenosine, deoxyguanosine, deoxycytidine, deoxyinosine, thymine, ribonebularine, 2'-O-methylnebularine, or 2'-deoxynebularine

SEQ ID NO: 2879 - RNA, 103 nt, synthetic construct; identical to SEQ ID NO: 1797
  source 1..103: mol_type = other RNA
  modified_base 1: mod_base = OTHER; note = 2'-O-Methyl-cytidine phosphorothioate
  modified_base 2: mod_base = OTHER; note = 2'-O-Methyl-adenosine phosphorothioate
  modified_base 3: mod_base = OTHER; note = 2'-O-Methyl-guanosine
  modified_base 21: mod_base = OTHER; note = 2'-O-Methyl-guanosine
  modified_base 28: mod_base = OTHER; note = 2'-O-Methyl-adenosine
  modified_base 29: mod_base = OTHER; note = 2'-O-Methyl-guanosine
  modified_base 30: mod_base = OTHER; note = 2'-O-Methyl-cytidine
  modified_base 31: mod_base = OTHER; note = 2'-O-Methyl-uridine
  modified_base 32: mod_base = OTHER; note = 2'-O-Methyl-adenosine
  modified_base 34: mod_base = OTHER; note = 2'-O-Methyl-adenosine
  modified_base 35: mod_base = OTHER; note = 2'-O-Methyl-adenosine
  modified_base 36: mod_base = OTHER; note = 2'-O-Methyl-adenosine
  modified_base 37: mod_base = OTHER; note = 2'-O-Methyl-uridine
  modified_base 38: mod_base = OTHER; note = 2'-O-Methyl-adenosine
  modified_base 39: mod_base = OTHER; note = 2'-O-Methyl-guanosine
  modified_base 40: mod_base = OTHER; note = 2'-O-Methyl-cytidine
  modified_base 41: mod_base = OTHER; note = 2'-O-Methyl-adenosine
  modified_base 42: mod_base = OTHER; note = 2'-O-Methyl-adenosine
  modified_base 45: mod_base = OTHER; note = uridine phosphorothioate
  modified_base 46: mod_base = OTHER; note = 2'-O-Methyl-adenosine
  modified_base 48: mod_base = OTHER; note = 2'-O-Methyl-adenosine
  modified_base 50: mod_base = OTHER; note = 2'-O-Methyl-uridine
  modified_base 52: mod_base = OTHER; note = 2'-O-Methyl-adenosine
  modified_base 53: mod_base = OTHER; note = 2'-O-Methyl-guanosine
  modified_base 54: mod_base = OTHER; note = 2'-O-Methyl-guanosine
  modified_base 57: mod_base = OTHER; note = 2'-O-Methyl-adenosine
  modified_base 61: mod_base = OTHER; note = 2'-O-Methyl-cytidine
  modified_base 66: mod_base = OTHER; note = 2'-O-Methyl-uridine
  modified_base 67: mod_base = OTHER; note = 2'-O-Methyl-cytidine
  modified_base 70: mod_base = OTHER; note = 2'-O-Methyl-cytidine
  modified_base 71: mod_base = OTHER; note = 2'-O-Methyl-uridine
  modified_base 72: mod_base = OTHER; note = 2'-O-Methyl-uridine
  modified_base 73: mod_base = OTHER; note = 2'-O-Methyl-guanosine
  modified_base 74: mod_base = OTHER; note = 2'-O-Methyl-adenosine
  modified_base 75: mod_base = OTHER; note = 2'-O-Methyl-adenosine
  modified_base 76: mod_base = OTHER; note = 2'-O-Methyl-adenosine
  modified_base 77: mod_base = OTHER; note = 2'-O-Methyl-adenosine
  modified_base 78: mod_base = OTHER; note = 2'-O-Methyl-adenosine
  modified_base 79: mod_base = OTHER; note = 2'-O-Methyl-guanosine
  modified_base 80: mod_base = OTHER; note = 2'-O-Methyl-uridine
  modified_base 82: mod_base = OTHER; note = 2'-O-Methyl-guanosine
  modified_base 83: mod_base = OTHER; note = 2'-O-Methyl-cytidine
  modified_base 84: mod_base = OTHER; note = 2'-O-Methyl-adenosine
  modified_base 85: mod_base = OTHER; note = 2'-O-Methyl-cytidine
  modified_base 86: mod_base = OTHER; note = 2'-O-Methyl-cytidine
  modified_base 87: mod_base = OTHER; note = 2'-O-Methyl-guanosine
  modified_base 89: mod_base = OTHER; note = 2'-O-Methyl-guanosine
  modified_base 92: mod_base = OTHER; note = 2'-O-Methyl-guanosine
  modified_base 93: mod_base = OTHER; note = 2'-O-Methyl-guanosine
  modified_base 94: mod_base = OTHER; note = 2'-O-Methyl-uridine
  modified_base 95: mod_base = OTHER; note = 2'-O-Methyl-guanosine
  modified_base 96: mod_base = OTHER; note = 2'-O-Methyl-cytidine
  modified_base 97: mod_base = OTHER; note = 2'-O-Methyl-uridine phosphorothioate
  modified_base 98: mod_base = OTHER; note = 2'-O-Methyl-uridine phosphorothioate
  modified_base 99: mod_base = OTHER; note = 2'-O-Methyl-uridine phosphorothioate
  modified_base 100: mod_base = OTHER; note = 2'-O-Methyl-uridine
  misc_difference 101: note = a, c, g, inosine, u, deoxyadenosine, deoxyguanosine, deoxycytidine, deoxyinosine, thymine, ribonebularine, 2'-O-methylnebularine, or 2'-deoxynebularine
  misc_difference 102: note = a, c, g, inosine, u, deoxyadenosine, deoxyguanosine, deoxycytidine, deoxyinosine, thymine, ribonebularine, 2'-O-methylnebularine, or 2'-deoxynebularine
  misc_difference 103: note = a, c, g, inosine, u, deoxyadenosine, deoxyguanosine, deoxycytidine, deoxyinosine, thymine, ribonebularine, 2'-O-methylnebularine, or 2'-deoxynebularine

SEQ ID NO: 2880 - RNA, 103 nt, synthetic construct; identical to SEQ ID NO: 1797
  source 1..103: mol_type = other RNA
  modified_base 1: mod_base = OTHER; note = 2'-O-Methyl-cytidine phosphorothioate
  modified_base 2: mod_base = OTHER; note = 2'-O-Methyl-adenosine phosphorothioate
  modified_base 3: mod_base = OTHER; note = 2'-O-Methyl-guanosine
  modified_base 21: mod_base = OTHER; note = 2'-O-Methyl-guanosine
  modified_base 28: mod_base = OTHER; note = 2'-O-Methyl-adenosine
  modified_base 29: mod_base = OTHER; note = 2'-O-Methyl-guanosine
  modified_base 30: mod_base = OTHER; note = 2'-O-Methyl-cytidine
  modified_base 31: mod_base = OTHER; note = 2'-O-Methyl-uridine
  modified_base 32: mod_base = OTHER; note = 2'-O-Methyl-adenosine
  modified_base 34: mod_base = OTHER; note = 2'-O-Methyl-adenosine
  modified_base 35: mod_base = OTHER; note = 2'-O-Methyl-adenosine
  modified_base 36: mod_base = OTHER; note = 2'-O-Methyl-adenosine
  modified_base 37: mod_base = OTHER; note = 2'-O-Methyl-uridine
  modified_base 38: mod_base = OTHER; note = 2'-O-Methyl-adenosine
  modified_base 39: mod_base = OTHER; note = 2'-O-Methyl-guanosine
  modified_base 40: mod_base = OTHER; note = 2'-O-Methyl-cytidine
  modified_base 41: mod_base = OTHER; note = 2'-O-Methyl-adenosine
  modified_base 42: mod_base = OTHER; note = 2'-O-Methyl-adenosine
  modified_base 45: mod_base = OTHER; note = uridine phosphorothioate
  modified_base 46: mod_base = OTHER; note = 2'-O-Methyl-adenosine
  modified_base 48: mod_base = OTHER; note = 2'-O-Methyl-adenosine
  modified_base 50: mod_base = OTHER; note = 2'-O-Methyl-uridine
  modified_base 52: mod_base = OTHER; note = 2'-O-Methyl-adenosine
  modified_base 53: mod_base = OTHER; note = 2'-O-Methyl-guanosine
  modified_base 54: mod_base = OTHER; note = 2'-O-Methyl-guanosine
  modified_base 57: mod_base = OTHER; note = 2'-O-Methyl-adenosine
  modified_base 61: mod_base = OTHER; note = 2'-O-Methyl-cytidine
  modified_base 66: mod_base = OTHER; note = 2'-O-Methyl-uridine
  modified_base 67: mod_base = OTHER; note = 2'-O-Methyl-cytidine
  modified_base 70: mod_base = OTHER; note = 2'-O-Methyl-cytidine
  modified_base 71: mod_base = OTHER; note = 2'-O-Methyl-uridine
  modified_base 72: mod_base = OTHER; note = 2'-O-Methyl-uridine
  modified_base 73: mod_base = OTHER; note = 2'-O-Methyl-guanosine
  modified_base 74: mod_base = OTHER; note = 2'-O-Methyl-adenosine
  modified_base 75: mod_base = OTHER; note = 2'-O-Methyl-adenosine
  modified_base 76: mod_base = OTHER; note = 2'-O-Methyl-adenosine
  modified_base 77: mod_base = OTHER; note = 2'-O-Methyl-adenosine
  modified_base 78: mod_base = OTHER; note = 2'-O-Methyl-adenosine
  modified_base 79: mod_base = OTHER; note = 2'-O-Methyl-guanosine
  modified_base 80: mod_base = OTHER; note = 2'-O-Methyl-uridine
  modified_base 82: mod_base = OTHER; note = 2'-O-Methyl-guanosine
  modified_base 83: mod_base = OTHER; note = 2'-O-Methyl-cytidine
  modified_base 84: mod_base = OTHER; note = 2'-O-Methyl-adenosine
  modified_base 85: mod_base = OTHER; note = 2'-O-Methyl-cytidine
  modified_base 86: mod_base = OTHER; note = 2'-O-Methyl-cytidine
  modified_base 87: mod_base = OTHER; note = 2'-O-Methyl-guanosine
  modified_base 89: mod_base = OTHER; note = 2'-O-Methyl-guanosine
  modified_base 91: mod_base = OTHER; note = 2'-O-Methyl-cytidine
  modified_base 92: mod_base = OTHER; note = 2'-O-Methyl-guanosine
  modified_base 93: mod_base = OTHER; note = 2'-O-Methyl-guanosine
  modified_base 94: mod_base = OTHER; note = 2'-O-Methyl-uridine
  modified_base 95: mod_base = OTHER; note = 2'-O-Methyl-guanosine
  modified_base 96: mod_base = OTHER; note = 2'-O-Methyl-cytidine
  modified_base 97: mod_base = OTHER; note = 2'-O-Methyl-uridine phosphorothioate
  modified_base 98: mod_base = OTHER; note = 2'-O-Methyl-uridine phosphorothioate
  modified_base 99: mod_base = OTHER; note = 2'-O-Methyl-uridine phosphorothioate
  modified_base 100: mod_base = OTHER; note = 2'-O-Methyl-uridine
  misc_difference 101: note = a, c, g, inosine, u, deoxyadenosine, deoxyguanosine, deoxycytidine, deoxyinosine, thymine, ribonebularine, 2'-O-methylnebularine, or 2'-deoxynebularine
  misc_difference 102: note = a, c, g, inosine, u, deoxyadenosine, deoxyguanosine, deoxycytidine, deoxyinosine, thymine, ribonebularine, 2'-O-methylnebularine, or 2'-deoxynebularine
  misc_difference 103: note = a, c, g, inosine, u, deoxyadenosine, deoxyguanosine, deoxycytidine, deoxyinosine, thymine, ribonebularine, 2'-O-methylnebularine, or 2'-deoxynebularine

SEQ ID NO: 2881 - RNA, 103 nt, synthetic construct; identical to SEQ ID NO: 1797
  source 1..103: mol_type = other RNA
  modified_base 1: mod_base = OTHER; note = 2'-O-Methyl-cytidine phosphorothioate
  modified_base 2: mod_base = OTHER; note = 2'-O-Methyl-adenosine phosphorothioate
  modified_base 3: mod_base = OTHER; note = 2'-O-Methyl-guanosine
  modified_base 21: mod_base = OTHER; note = 2'-O-Methyl-guanosine
  modified_base 28: mod_base = OTHER; note = 2'-O-Methyl-adenosine
  modified_base 29: mod_base = OTHER; note = 2'-O-Methyl-guanosine
  modified_base 30: mod_base = OTHER; note = 2'-O-Methyl-cytidine
  modified_base 31: mod_base = OTHER; note = 2'-O-Methyl-uridine
  modified_base 32: mod_base = OTHER; note = 2'-O-Methyl-adenosine
  modified_base 34: mod_base = OTHER; note = 2'-O-Methyl-adenosine
  modified_base 35: mod_base = OTHER; note = 2'-O-Methyl-adenosine
  modified_base 36: mod_base = OTHER; note = 2'-O-Methyl-adenosine
  modified_base 37: mod_base = OTHER; note = 2'-O-Methyl-uridine
  modified_base 38: mod_base = OTHER; note = 2'-O-Methyl-adenosine
  modified_base 39: mod_base = OTHER; note = 2'-O-Methyl-guanosine
  modified_base 40: mod_base = OTHER; note = 2'-O-Methyl-cytidine
  modified_base 41: mod_base = OTHER; note = 2'-O-Methyl-adenosine
  modified_base 42: mod_base = OTHER; note = 2'-O-Methyl-adenosine
  modified_base 45: mod_base = OTHER; note = uridine phosphorothioate
  modified_base 46: mod_base = OTHER; note = 2'-O-Methyl-adenosine
  modified_base 48: mod_base = OTHER; note = 2'-O-Methyl-adenosine
  modified_base 50: mod_base = OTHER; note = 2'-O-Methyl-uridine
  modified_base 52: mod_base = OTHER; note = 2'-O-Methyl-adenosine
  modified_base 53: mod_base = OTHER; note = 2'-O-Methyl-guanosine
  modified_base 54: mod_base = OTHER; note = 2'-O-Methyl-guanosine
  modified_base 55: mod_base = OTHER; note = 2'-O-Methyl-cytidine
  modified_base 56: mod_base = OTHER; note = 2'-O-Methyl-uridine
  modified_base 57: mod_base = OTHER; note = 2'-O-Methyl-adenosine
  modified_base 60: mod_base = OTHER; note = 2'-O-Methyl-cytidine
  modified_base 61: mod_base = OTHER; note = 2'-O-Methyl-cytidine
  modified_base 66: mod_base = OTHER; note = 2'-O-Methyl-uridine
  modified_base 67: mod_base = OTHER; note = 2'-O-Methyl-cytidine
  modified_base 70: mod_base = OTHER; note = 2'-O-Methyl-cytidine
  modified_base 71: mod_base = OTHER; note = 2'-O-Methyl-uridine
  modified_base 72: mod_base = OTHER; note = 2'-O-Methyl-uridine
  modified_base 74: mod_base = OTHER; note = 2'-O-Methyl-adenosine
  modified_base 75: mod_base = OTHER; note = 2'-O-Methyl-adenosine
  modified_base 76: mod_base = OTHER; note = 2'-O-Methyl-adenosine
  modified_base 77: mod_base = OTHER; note = 2'-O-Methyl-adenosine
  modified_base 78: mod_base = OTHER; note = 2'-O-Methyl-adenosine
  modified_base 79: mod_base = OTHER; note = 2'-O-Methyl-guanosine
  modified_base 80: mod_base = OTHER; note = 2'-O-Methyl-uridine
  modified_base 82: mod_base = OTHER; note = 2'-O-Methyl-guanosine
  modified_base 83: mod_base = OTHER; note = 2'-O-Methyl-cytidine
  modified_base 84: mod_base = OTHER; note = 2'-O-Methyl-adenosine
  modified_base 85: mod_base = OTHER; note = 2'-O-Methyl-cytidine
  modified_base 86: mod_base = OTHER; note = 2'-O-Methyl-cytidine
  modified_base 87: mod_base = OTHER; note = 2'-O-Methyl-guanosine
  modified_base 89: mod_base = OTHER; note = 2'-O-Methyl-guanosine
  modified_base 92: mod_base = OTHER; note = 2'-O-Methyl-guanosine
  modified_base 93: mod_base = OTHER; note = 2'-O-Methyl-guanosine
  modified_base 94: mod_base = OTHER; note = 2'-O-Methyl-uridine
  modified_base 95: mod_base = OTHER; note = 2'-O-Methyl-guanosine
  modified_base 96: mod_base = OTHER; note = 2'-O-Methyl-cytidine
  modified_base 97: mod_base = OTHER; note = 2'-O-Methyl-uridine phosphorothioate
  modified_base 98: mod_base = OTHER; note = 2'-O-Methyl-uridine phosphorothioate
  modified_base 99: mod_base = OTHER; note = 2'-O-Methyl-uridine phosphorothioate
  modified_base 100: mod_base = OTHER; note = 2'-O-Methyl-uridine
  misc_difference 101: note = a, c, g, inosine, u, deoxyadenosine, deoxyguanosine, deoxycytidine, deoxyinosine, thymine, ribonebularine, 2'-O-methylnebularine, or 2'-deoxynebularine
  misc_difference 102: note = a, c, g, inosine, u, deoxyadenosine, deoxyguanosine, deoxycytidine, deoxyinosine, thymine, ribonebularine, 2'-O-methylnebularine, or 2'-deoxynebularine
  misc_difference 103: note = a, c, g, inosine, u, deoxyadenosine, deoxyguanosine, deoxycytidine, deoxyinosine, thymine, ribonebularine, 2'-O-methylnebularine, or 2'-deoxynebularine

SEQ ID NO: 2882 - RNA, 103 nt, synthetic construct; identical to SEQ ID NO: 1795
  source 1..103: mol_type = other RNA
  modified_base 1: mod_base = OTHER; note = 2'-O-Methyl-cytidine phosphorothioate
  modified_base 2: mod_base = OTHER; note = 2'-O-Methyl-cytidine phosphorothioate
  modified_base 3: mod_base = OTHER; note = 2'-O-Methyl-cytidine
  modified_base 21: mod_base = OTHER; note = 2'-O-Methyl-guanosine
  modified_base 25: mod_base = OTHER; note = uridine phosphorothioate
  modified_base 28: mod_base = OTHER; note = 2'-O-Methyl-adenosine
  modified_base 29: mod_base = OTHER; note = 2'-O-Methyl-guanosine
  modified_base 30: mod_base = OTHER; note = 2'-O-Methyl-cytidine
  modified_base 31: mod_base = OTHER; note = 2'-O-Methyl-uridine
  modified_base 32: mod_base = OTHER; note = 2'-O-Methyl-adenosine
  modified_base 33: mod_base = OTHER; note = 2'-O-Methyl-guanosine
  modified_base 34: mod_base = OTHER; note = 2'-O-Methyl-adenosine
  modified_base 35: mod_base = OTHER; note = 2'-O-Methyl-adenosine
  modified_base 36: mod_base = OTHER; note = 2'-O-Methyl-adenosine
  modified_base 37: mod_base = OTHER; note = 2'-O-Methyl-uridine
  modified_base 38: mod_base = OTHER; note = 2'-O-Methyl-adenosine
  modified_base 39: mod_base = OTHER; note = 2'-O-Methyl-guanosine
  modified_base 40: mod_base = OTHER; note = 2'-O-Methyl-cytidine
  modified_base 41: mod_base = OTHER; note = 2'-O-Methyl-adenosine
  modified_base 42: mod_base = OTHER; note = 2'-O-Methyl-adenosine
  modified_base 46: mod_base = OTHER; note = 2'-O-Methyl-adenosine
  modified_base 48: mod_base = OTHER; note = 2'-O-Methyl-adenosine
  modified_base 50: mod_base = OTHER; note = 2'-O-Methyl-uridine
  modified_base 52: mod_base = OTHER; note = 2'-O-Methyl-adenosine
  modified_base 53: mod_base = OTHER; note = 2'-O-Methyl-guanosine
  modified_base 54: mod_base = OTHER; note = 2'-O-Methyl-guanosine
  modified_base 55: mod_base = OTHER; note = 2'-O-Methyl-cytidine
  modified_base 56: mod_base = OTHER; note = 2'-O-Methyl-uridine
  modified_base 57: mod_base = OTHER; note = 2'-O-Methyl-adenosine
  modified_base 60: mod_base = OTHER; note = 2'-O-Methyl-cytidine
  modified_base 61: mod_base = OTHER; note = 2'-O-Methyl-cytidine
  modified_base 66: mod_base = OTHER; note = 2'-O-Methyl-uridine
  modified_base 67: mod_base = OTHER; note = 2'-O-Methyl-cytidine
  modified_base 70: mod_base = OTHER; note = 2'-O-Methyl-cytidine
  modified_base 71: mod_base = OTHER; note = 2'-O-Methyl-uridine
  modified_base 72: mod_base = OTHER; note = 2'-O-Methyl-uridine
  modified_base 73: mod_base = OTHER; note = 2'-O-Methyl-guanosine
  modified_base 74: mod_base = OTHER; note = 2'-O-Methyl-adenosine
  modified_base 75: mod_base = OTHER; note = 2'-O-Methyl-adenosine
  modified_base 76: mod_base = OTHER; note = 2'-O-Methyl-adenosine
  modified_base 77: mod_base = OTHER; note = 2'-O-Methyl-adenosine
  modified_base 78: mod_base = OTHER; note = 2'-O-Methyl-adenosine
  modified_base 79: mod_base = OTHER; note = 2'-O-Methyl-guanosine
  modified_base 80: mod_base = OTHER; note = 2'-O-Methyl-uridine
  modified_base 81: mod_base = OTHER; note = 2'-O-Methyl-guanosine
  modified_base 83: mod_base = OTHER; note = 2'-O-Methyl-cytidine
  modified_base 84: mod_base = OTHER; note = 2'-O-Methyl-adenosine
  modified_base 85: mod_base = OTHER; note = 2'-O-Methyl-cytidine
  modified_base 86: mod_base = OTHER; note = 2'-O-Methyl-cytidine
  modified_base 87: mod_base = OTHER; note = 2'-O-Methyl-guanosine
  modified_base 88: mod_base = OTHER; note = 2'-O-Methyl-adenosine
  modified_base 89: mod_base = OTHER; note = 2'-O-Methyl-guanosine
  modified_base 90: mod_base = OTHER; note = 2'-O-Methyl-uridine
  modified_base 91: mod_base = OTHER; note = 2'-O-Methyl-cytidine
  modified_base 92: mod_base = OTHER; note = 2'-O-Methyl-guanosine
  modified_base 93: mod_base = OTHER; note = 2'-O-Methyl-guanosine
  modified_base 94: mod_base = OTHER; note = 2'-O-Methyl-uridine
  modified_base 95: mod_base = OTHER; note = 2'-O-Methyl-guanosine
  modified_base 96: mod_base = OTHER; note = 2'-O-Methyl-cytidine
  modified_base 97: mod_base = OTHER; note = 2'-O-Methyl-uridine phosphorothioate
  modified_base 98: mod_base = OTHER; note = 2'-O-Methyl-uridine phosphorothioate
  modified_base 99: mod_base = OTHER; note = 2'-O-Methyl-uridine phosphorothioate
  modified_base 100: mod_base = OTHER; note = 2'-O-Methyl-uridine
  misc_difference 101: note = a, c, g, inosine, u, deoxyadenosine, deoxyguanosine, deoxycytidine, deoxyinosine, thymine, ribonebularine, 2'-O-methylnebularine, or 2'-deoxynebularine
  misc_difference 102: note = a, c, g, inosine, u, deoxyadenosine, deoxyguanosine, deoxycytidine, deoxyinosine, thymine, ribonebularine, 2'-O-methylnebularine, or 2'-deoxynebularine
  misc_difference 103: note = a, c, g, inosine, u, deoxyadenosine, deoxyguanosine, deoxycytidine, deoxyinosine, thymine, ribonebularine, 2'-O-methylnebularine, or 2'-deoxynebularine

SEQ ID NO: 2883 - RNA, 103 nt, synthetic construct; identical to SEQ ID NO: 1795
  source 1..103: mol_type = other RNA
  modified_base 1: mod_base = OTHER; note = 2'-O-Methyl-cytidine phosphorothioate
  modified_base 2: mod_base = OTHER; note = 2'-O-Methyl-cytidine phosphorothioate
  modified_base 3: mod_base = OTHER; note = 2'-O-Methyl-cytidine
  modified_base 21: mod_base = OTHER; note = 2'-O-Methyl-guanosine
  modified_base 25: mod_base = OTHER; note = uridine phosphorothioate
  modified_base 28: mod_base = OTHER; note = 2'-O-Methyl-adenosine
  modified_base 29: mod_base = OTHER; note = 2'-O-Methyl-guanosine
  modified_base 30: mod_base = OTHER; note = 2'-O-Methyl-cytidine
  modified_base 31: mod_base = OTHER; note = 2'-O-Methyl-uridine
  modified_base 32: mod_base = OTHER; note = 2'-O-Methyl-adenosine
  modified_base 34: mod_base = OTHER; note = 2'-O-Methyl-adenosine
  modified_base 35: mod_base = OTHER; note = 2'-O-Methyl-adenosine
  modified_base 36: mod_base = OTHER; note = 2'-O-Methyl-adenosine
  modified_base 37: mod_base = OTHER; note = 2'-O-Methyl-uridine
  modified_base 38: mod_base = OTHER; note = 2'-O-Methyl-adenosine
  modified_base 39: mod_base = OTHER; note = 2'-O-Methyl-guanosine
  modified_base 40: mod_base = OTHER; note = 2'-O-Methyl-cytidine
  modified_base 41: mod_base = OTHER; note = 2'-O-Methyl-adenosine
  modified_base 42: mod_base = OTHER; note = 2'-O-Methyl-adenosine
  modified_base 46: mod_base = OTHER; note = 2'-O-Methyl-adenosine
  modified_base 48: mod_base = OTHER; note = 2'-O-Methyl-adenosine
  modified_base 50: mod_base = OTHER; note = 2'-O-Methyl-uridine
  modified_base 52: mod_base = OTHER; note = 2'-O-Methyl-adenosine
  modified_base 53: mod_base = OTHER; note = 2'-O-Methyl-guanosine
  modified_base 54: mod_base = OTHER; note = 2'-O-Methyl-guanosine
  modified_base 55: mod_base = OTHER; note = 2'-O-Methyl-cytidine
  modified_base 56: mod_base = OTHER; note = 2'-O-Methyl-uridine
  modified_base 57: mod_base = OTHER; note = 2'-O-Methyl-adenosine
  modified_base 60: mod_base = OTHER; note = 2'-O-Methyl-cytidine
  modified_base 61: mod_base = OTHER; note = 2'-O-Methyl-cytidine
  modified_base 66: mod_base = OTHER; note = 2'-O-Methyl-uridine
  modified_base 67: mod_base = OTHER; note = 2'-O-Methyl-cytidine
  modified_base 70: mod_base = OTHER; note = 2'-O-Methyl-cytidine
  modified_base 71: mod_base = OTHER; note = 2'-O-Methyl-uridine
  modified_base 72: mod_base = OTHER; note = 2'-O-Methyl-uridine
  modified_base 74: mod_base = OTHER; note = 2'-O-Methyl-adenosine
  modified_base 75: mod_base = OTHER; note = 2'-O-Methyl-adenosine
  modified_base 76: mod_base = OTHER; note = 2'-O-Methyl-adenosine
  modified_base 77: mod_base = OTHER; note = 2'-O-Methyl-adenosine
  modified_base 78: mod_base = OTHER; note = 2'-O-Methyl-adenosine
  modified_base 79: mod_base = OTHER; note = 2'-O-Methyl-guanosine
  modified_base 80: mod_base = OTHER; note = 2'-O-Methyl-uridine
  modified_base 81: mod_base = OTHER; note = 2'-O-Methyl-guanosine
  modified_base 83: mod_base = OTHER; note = 2'-O-Methyl-cytidine
  modified_base 84: mod_base = OTHER; note = 2'-O-Methyl-adenosine
  modified_base 85: mod_base = OTHER; note = 2'-O-Methyl-cytidine
  modified_base 86: mod_base = OTHER; note = 2'-O-Methyl-cytidine
  modified_base 87: mod_base = OTHER; note = 2'-O-Methyl-guanosine
  modified_base 88: mod_base = OTHER; note = 2'-O-Methyl-adenosine
  modified_base 89: mod_base = OTHER; note = 2'-O-Methyl-guanosine
  modified_base 90: mod_base = OTHER; note = 2'-O-Methyl-uridine
  modified_base 91: mod_base = OTHER; note = 2'-O-Methyl-cytidine
  modified_base 92: mod_base = OTHER; note = 2'-O-Methyl-guanosine
  modified_base 93: mod_base = OTHER; note = 2'-O-Methyl-guanosine
  modified_base 94: mod_base = OTHER; note = 2'-O-Methyl-uridine
  modified_base 95: mod_base = OTHER; note = 2'-O-Methyl-guanosine
  modified_base 96: mod_base = OTHER; note = 2'-O-Methyl-cytidine
  modified_base 97: mod_base = OTHER; note = 2'-O-Methyl-uridine phosphorothioate
  modified_base 98: mod_base = OTHER; note = 2'-O-Methyl-uridine phosphorothioate
  modified_base 99: mod_base = OTHER; note = 2'-O-Methyl-uridine phosphorothioate
  modified_base 100: mod_base = OTHER; note = 2'-O-Methyl-uridine
  misc_difference 101: note = a, c, g, inosine, u, deoxyadenosine, deoxyguanosine, deoxycytidine, deoxyinosine, thymine, ribonebularine, 2'-O-methylnebularine, or 2'-deoxynebularine
  misc_difference 102: note = a, c, g, inosine, u, deoxyadenosine, deoxyguanosine, deoxycytidine, deoxyinosine, thymine, ribonebularine, 2'-O-methylnebularine, or 2'-deoxynebularine
  misc_difference 103: note = a, c, g, inosine, u, deoxyadenosine, deoxyguanosine, deoxycytidine, deoxyinosine, thymine, ribonebularine, 2'-O-methylnebularine, or 2'-deoxynebularine

SEQ ID NO: 2884 - RNA, 103 nt, synthetic construct; identical to SEQ ID NO: 1796
  source 1..103: mol_type = other RNA
  modified_base 1: mod_base = OTHER; note = 2'-O-Methyl-guanosine phosphorothioate
  modified_base 2: mod_base = OTHER; note = 2'-O-Methyl-adenosine phosphorothioate
  modified_base 3: mod_base = OTHER; note = 2'-O-Methyl-guanosine
  modified_base 21: mod_base = OTHER; note = 2'-O-Methyl-guanosine
  modified_base 25: mod_base = OTHER; note = uridine phosphorothioate
  modified_base 28: mod_base = OTHER; note = 2'-O-Methyl-adenosine
  modified_base 29: mod_base = OTHER; note = 2'-O-Methyl-guanosine
  modified_base 30: mod_base = OTHER; note = 2'-O-Methyl-cytidine
  modified_base 31: mod_base = OTHER; note = 2'-O-Methyl-uridine
  modified_base 32: mod_base = OTHER; note = 2'-O-Methyl-adenosine
  modified_base 33: mod_base = OTHER; note = 2'-O-Methyl-guanosine
  modified_base 34: mod_base = OTHER; note = 2'-O-Methyl-adenosine
  modified_base 35: mod_base = OTHER; note = 2'-O-Methyl-adenosine
  modified_base 36: mod_base = OTHER; note = 2'-O-Methyl-adenosine
  modified_base 37: mod_base = OTHER; note = 2'-O-Methyl-uridine
  modified_base 38: mod_base = OTHER; note = 2'-O-Methyl-adenosine
  modified_base 39: mod_base = OTHER; note = 2'-O-Methyl-guanosine
  modified_base 40: mod_base = OTHER; note = 2'-O-Methyl-cytidine
  modified_base 41: mod_base = OTHER; note = 2'-O-Methyl-adenosine
  modified_base 42: mod_base = OTHER; note = 2'-O-Methyl-adenosine
  modified_base 46: mod_base = OTHER; note = 2'-O-Methyl-adenosine
  modified_base 48: mod_base = OTHER; note = 2'-O-Methyl-adenosine
  modified_base 50: mod_base = OTHER; note = 2'-O-Methyl-uridine
  modified_base 52: mod_base = OTHER; note = 2'-O-Methyl-adenosine
  modified_base 53: mod_base = OTHER; note = 2'-O-Methyl-guanosine
  modified_base 54: mod_base = OTHER; note = 2'-O-Methyl-guanosine
  modified_base 55: mod_base = OTHER; note = 2'-O-Methyl-cytidine
  modified_base 56: mod_base = OTHER; note = 2'-O-Methyl-uridine
  modified_base 57: mod_base = OTHER; note = 2'-O-Methyl-adenosine
  modified_base 60: mod_base = OTHER; note = 2'-O-Methyl-cytidine
  modified_base 61: mod_base = OTHER; note = 2'-O-Methyl-cytidine
  modified_base 66: mod_base = OTHER; note = 2'-O-Methyl-uridine
  modified_base 67: mod_base = OTHER; note = 2'-O-Methyl-cytidine
  modified_base 70: mod_base = OTHER; note = 2'-O-Methyl-cytidine
  modified_base 71: mod_base = OTHER; note = 2'-O-Methyl-uridine
  modified_base 72: mod_base = OTHER; note = 2'-O-Methyl-uridine
  modified_base 73: mod_base = OTHER; note = 2'-O-Methyl-guanosine
  modified_base 74: mod_base = OTHER; note = 2'-O-Methyl-adenosine
  modified_base 75: mod_base = OTHER; note = 2'-O-Methyl-adenosine
  modified_base 76: mod_base = OTHER; note = 2'-O-Methyl-adenosine
  modified_base 77: mod_base = OTHER; note = 2'-O-Methyl-adenosine
  modified_base 78: mod_base = OTHER; note = 2'-O-Methyl-adenosine
  modified_base 79: mod_base = OTHER; note = 2'-O-Methyl-guanosine
  modified_base 80: mod_base = OTHER; note = 2'-O-Methyl-uridine
  modified_base 81: mod_base = OTHER; note = 2'-O-Methyl-guanosine
  modified_base 83: mod_base = OTHER; note = 2'-O-Methyl-cytidine
  modified_base 84: mod_base = OTHER; note = 2'-O-Methyl-adenosine
  modified_base 85: mod_base = OTHER; note = 2'-O-Methyl-cytidine
  modified_base 86: mod_base = OTHER; note = 2'-O-Methyl-cytidine
  modified_base 87: mod_base = OTHER; note = 2'-O-Methyl-guanosine
  modified_base 88: mod_base = OTHER; note = 2'-O-Methyl-adenosine
  modified_base 89: mod_base = OTHER; note = 2'-O-Methyl-guanosine
  modified_base 90: mod_base = OTHER; note = 2'-O-Methyl-uridine
  modified_base 91: mod_base = OTHER; note = 2'-O-Methyl-cytidine
  modified_base 92: mod_base = OTHER; note = 2'-O-Methyl-guanosine
  modified_base 93: mod_base = OTHER; note = 2'-O-Methyl-guanosine
  modified_base 94: mod_base = OTHER; note = 2'-O-Methyl-uridine
  modified_base 95: mod_base = OTHER; note = 2'-O-Methyl-guanosine
  modified_base 96: mod_base = OTHER; note = 2'-O-Methyl-cytidine
  modified_base 97: mod_base = OTHER; note = 2'-O-Methyl-uridine phosphorothioate
  modified_base 98: mod_base = OTHER; note = 2'-O-Methyl-uridine phosphorothioate
  modified_base 99: mod_base = OTHER; note = 2'-O-Methyl-uridine phosphorothioate
  modified_base 100: mod_base = OTHER; note = 2'-O-Methyl-uridine
  misc_difference 101: note = a, c, g, inosine, u, deoxyadenosine, deoxyguanosine, deoxycytidine, deoxyinosine, thymine, ribonebularine, 2'-O-methylnebularine, or 2'-deoxynebularine
  misc_difference 102: note = a, c, g, inosine, u, deoxyadenosine, deoxyguanosine, deoxycytidine, deoxyinosine, thymine, ribonebularine, 2'-O-methylnebularine, or 2'-deoxynebularine
  misc_difference 103: note = a, c, g, inosine, u, deoxyadenosine, deoxyguanosine, deoxycytidine, deoxyinosine, thymine, ribonebularine, 2'-O-methylnebularine, or 2'-deoxynebularine

SEQ ID NO: 2885 - RNA, 103 nt, synthetic construct; identical to SEQ ID NO: 1796
  source 1..103: mol_type = other RNA
  modified_base 1: mod_base = OTHER; note = 2'-O-Methyl-guanosine phosphorothioate
  modified_base 2: mod_base = OTHER; note = 2'-O-Methyl-adenosine phosphorothioate
  modified_base 3: mod_base = OTHER; note = 2'-O-Methyl-guanosine
  modified_base 21: mod_base = OTHER; note = 2'-O-Methyl-guanosine
  modified_base 25: mod_base = OTHER; note = uridine phosphorothioate
  modified_base 28: mod_base = OTHER; note = 2'-O-Methyl-adenosine
  modified_base 29: mod_base = OTHER; note = 2'-O-Methyl-guanosine
  modified_base 30: mod_base = OTHER; note = 2'-O-Methyl-cytidine
  modified_base 31: mod_base = OTHER; note = 2'-O-Methyl-uridine
  modified_base 32: mod_base = OTHER; note = 2'-O-Methyl-adenosine
  modified_base 34: mod_base = OTHER; note = 2'-O-Methyl-adenosine
  modified_base 35: mod_base = OTHER; note = 2'-O-Methyl-adenosine
  modified_base 36: mod_base = OTHER; note = 2'-O-Methyl-adenosine
  modified_base 37: mod_base = OTHER; note = 2'-O-Methyl-uridine
  modified_base 38: mod_base = OTHER; note = 2'-O-Methyl-adenosine
  modified_base 39: mod_base = OTHER; note = 2'-O-Methyl-guanosine
  modified_base 40: mod_base = OTHER; note = 2'-O-Methyl-cytidine
  modified_base 41: mod_base = OTHER; note = 2'-O-Methyl-adenosine
  modified_base 42: mod_base = OTHER; note = 2'-O-Methyl-adenosine
  modified_base 46: mod_base = OTHER; note = 2'-O-Methyl-adenosine
  modified_base 48: mod_base = OTHER; note = 2'-O-Methyl-adenosine
  modified_base 50: mod_base = OTHER; note = 2'-O-Methyl-uridine
  modified_base 52: mod_base = OTHER; note = 2'-O-Methyl-adenosine
  modified_base 53: mod_base = OTHER; note = 2'-O-Methyl-guanosine
  modified_base 54: mod_base = OTHER; note = 2'-O-Methyl-guanosine
  modified_base 55: mod_base = OTHER; note = 2'-O-Methyl-cytidine
  modified_base 56: mod_base = OTHER; note = 2'-O-Methyl-uridine
  modified_base 57: mod_base = OTHER; note = 2'-O-Methyl-adenosine
  modified_base 60: mod_base = OTHER; note = 2'-O-Methyl-cytidine
  modified_base 61: mod_base = OTHER; note = 2'-O-Methyl-cytidine
  modified_base 66: mod_base = OTHER; note = 2'-O-Methyl-uridine
  modified_base 67: mod_base = OTHER; note = 2'-O-Methyl-cytidine
  modified_base 70: mod_base = OTHER; note = 2'-O-Methyl-cytidine
  modified_base 71: mod_base = OTHER; note = 2'-O-Methyl-uridine
  modified_base 72: mod_base = OTHER; note = 2'-O-Methyl-uridine
  modified_base 74: mod_base = OTHER; note = 2'-O-Methyl-adenosine
  modified_base 75: mod_base = OTHER; note = 2'-O-Methyl-adenosine
  modified_base 76: mod_base = OTHER; note = 2'-O-Methyl-adenosine
  modified_base 77: mod_base = OTHER; note = 2'-O-Methyl-adenosine
  modified_base 78: mod_base = OTHER; note = 2'-O-Methyl-adenosine
  modified_base 79: mod_base = OTHER; note = 2'-O-Methyl-guanosine
  modified_base 80: mod_base = OTHER; note = 2'-O-Methyl-uridine
  modified_base 81: mod_base = OTHER; note = 2'-O-Methyl-guanosine
  modified_base 83: mod_base = OTHER; note = 2'-O-Methyl-cytidine
  modified_base 84: mod_base = OTHER; note = 2'-O-Methyl-adenosine
  modified_base 85: mod_base = OTHER; note = 2'-O-Methyl-cytidine
  modified_base 86: mod_base = OTHER; note = 2'-O-Methyl-cytidine
  modified_base 87: mod_base = OTHER; note = 2'-O-Methyl-guanosine
  modified_base 88: mod_base = OTHER; note = 2'-O-Methyl-adenosine
  modified_base 89: mod_base = OTHER; note = 2'-O-Methyl-guanosine
  modified_base 90: mod_base = OTHER; note = 2'-O-Methyl-uridine
  modified_base 91: mod_base = OTHER; note = 2'-O-Methyl-cytidine
  modified_base 92: mod_base = OTHER; note = 2'-O-Methyl-guanosine
  modified_base 93: mod_base = OTHER; note = 2'-O-Methyl-guanosine
  modified_base 94: mod_base = OTHER; note = 2'-O-Methyl-uridine
  modified_base 95: mod_base = OTHER; note = 2'-O-Methyl-guanosine
  modified_base 96: mod_base = OTHER; note = 2'-O-Methyl-cytidine
  modified_base 97: mod_base = OTHER; note = 2'-O-Methyl-uridine phosphorothioate
  modified_base 98: mod_base = OTHER; note = 2'-O-Methyl-uridine phosphorothioate
  modified_base 99: mod_base = OTHER; note = 2'-O-Methyl-uridine phosphorothioate
  modified_base 100: mod_base = OTHER; note = 2'-O-Methyl-uridine
  misc_difference 101: note = a, c, g, inosine, u, deoxyadenosine, deoxyguanosine, deoxycytidine, deoxyinosine, thymine, ribonebularine, 2'-O-methylnebularine, or 2'-deoxynebularine
  misc_difference 102: note = a, c, g, inosine, u, deoxyadenosine, deoxyguanosine, deoxycytidine, deoxyinosine, thymine, ribonebularine, 2'-O-methylnebularine, or 2'-deoxynebularine
  misc_difference 103: note = a, c, g, inosine, u, deoxyadenosine, deoxyguanosine, deoxycytidine, deoxyinosine, thymine, ribonebularine, 2'-O-methylnebularine, or 2'-deoxynebularine

SEQ ID NO: 2886 - RNA, 103 nt, synthetic construct; identical to SEQ ID NO: 1797
  source 1..103: mol_type = other RNA
  modified_base 1: mod_base = OTHER; note = 2'-O-Methyl-cytidine phosphorothioate
  modified_base 2: mod_base = OTHER; note = 2'-O-Methyl-adenosine phosphorothioate
  modified_base 3: mod_base = OTHER; note = 2'-O-Methyl-guanosine
  modified_base 21: mod_base = OTHER; note = 2'-O-Methyl-guanosine
  modified_base 25: mod_base = OTHER; note = uridine phosphorothioate
  modified_base 28: mod_base = OTHER; note = 2'-O-Methyl-adenosine
  modified_base 29: mod_base = OTHER; note = 2'-O-Methyl-guanosine
  modified_base 30: mod_base = OTHER; note = 2'-O-Methyl-cytidine
  modified_base 31: mod_base = OTHER; note = 2'-O-Methyl-uridine
  modified_base 32: mod_base = OTHER; note = 2'-O-Methyl-adenosine
  modified_base 33: mod_base = OTHER; note = 2'-O-Methyl-guanosine
  modified_base 34: mod_base = OTHER; note = 2'-O-Methyl-adenosine
  modified_base 35: mod_base = OTHER; note = 2'-O-Methyl-adenosine
  modified_base 36: mod_base = OTHER; note = 2'-O-Methyl-adenosine
  modified_base 37: mod_base = OTHER; note = 2'-O-Methyl-uridine
  modified_base 38: mod_base = OTHER; note = 2'-O-Methyl-adenosine
  modified_base 39: mod_base = OTHER; note = 2'-O-Methyl-guanosine
  modified_base 40: mod_base = OTHER; note = 2'-O-Methyl-cytidine
  modified_base 41: mod_base = OTHER; note = 2'-O-Methyl-adenosine
  modified_base 42: mod_base = OTHER; note = 2'-O-Methyl-adenosine
  modified_base 46: mod_base = OTHER; note = 2'-O-Methyl-adenosine
  modified_base 48: mod_base = OTHER; note = 2'-O-Methyl-adenosine
  modified_base 50: mod_base = OTHER; note = 2'-O-Methyl-uridine
  modified_base 52: mod_base = OTHER; note = 2'-O-Methyl-adenosine
  modified_base 53: mod_base = OTHER; note = 2'-O-Methyl-guanosine
  modified_base 54: mod_base = OTHER; note = 2'-O-Methyl-guanosine
  modified_base 57: mod_base = OTHER; note = 2'-O-Methyl-adenosine
  modified_base 61: mod_base = OTHER; note = 2'-O-Methyl-cytidine
  modified_base 66: mod_base = OTHER; note = 2'-O-Methyl-uridine
  modified_base 67: mod_base = OTHER; note = 2'-O-Methyl-cytidine
  modified_base 70: mod_base = OTHER; note = 2'-O-Methyl-cytidine
  modified_base 71: mod_base = OTHER; note = 2'-O-Methyl-uridine
  modified_base 72: mod_base = OTHER; note = 2'-O-Methyl-uridine
  modified_base 74: mod_base = OTHER; note = 2'-O-Methyl-adenosine
  modified_base 75: mod_base = OTHER; note = 2'-O-Methyl-adenosine
  modified_base 76: mod_base = OTHER; note = 2'-O-Methyl-adenosine
  modified_base 77: mod_base = OTHER; note = 2'-O-Methyl-adenosine
  modified_base 78: mod_base = OTHER; note = 2'-O-Methyl-adenosine
  modified_base 79: mod_base = OTHER; note = 2'-O-Methyl-guanosine
  modified_base 80: mod_base = OTHER; note = 2'-O-Methyl-uridine
  modified_base 82: mod_base = OTHER; note = 2'-O-Methyl-guanosine
  modified_base 83: mod_base = OTHER; note = 2'-O-Methyl-cytidine
  modified_base 84: mod_base = OTHER; note = 2'-O-Methyl-adenosine
  modified_base 85: mod_base = OTHER; note = 2'-O-Methyl-cytidine
  modified_base 86: mod_base = OTHER; note = 2'-O-Methyl-cytidine
  modified_base 87: mod_base = OTHER; note = 2'-O-Methyl-guanosine
  modified_base 89: mod_base = OTHER; note = 2'-O-Methyl-guanosine
  modified_base 92: mod_base = OTHER; note = 2'-O-Methyl-guanosine
  modified_base 93: mod_base = OTHER; note = 2'-O-Methyl-guanosine
  modified_base 94: mod_base = OTHER; note = 2'-O-Methyl-uridine
  modified_base 95: mod_base = OTHER; note = 2'-O-Methyl-guanosine
  modified_base 96: mod_base = OTHER; note = 2'-O-Methyl-cytidine
  modified_base 97: mod_base = OTHER; note = 2'-O-Methyl-uridine phosphorothioate
  modified_base 98: mod_base = OTHER; note = 2'-O-Methyl-uridine phosphorothioate
  modified_base 99: mod_base = OTHER; note = 2'-O-Methyl-uridine phosphorothioate
  modified_base 100: mod_base = OTHER; note = 2'-O-Methyl-uridine
  misc_difference 101: note = a, c, g, inosine, u, deoxyadenosine, deoxyguanosine, deoxycytidine, deoxyinosine, thymine, ribonebularine, 2'-O-methylnebularine, or 2'-deoxynebularine
  misc_difference 102: note = a, c, g, inosine, u, deoxyadenosine, deoxyguanosine, deoxycytidine, deoxyinosine, thymine, ribonebularine, 2'-O-methylnebularine, or 2'-deoxynebularine
  misc_difference 103: note = a, c, g, inosine, u, deoxyadenosine, deoxyguanosine, deoxycytidine, deoxyinosine, thymine, ribonebularine, 2'-O-methylnebularine, or 2'-deoxynebularine

SEQ ID NO: 2887 - RNA, 103 nt, synthetic construct; identical to SEQ ID NO: 1797
  source 1..103: mol_type = other RNA
  modified_base 1: mod_base = OTHER; note = 2'-O-Methyl-cytidine phosphorothioate
  modified_base 2: mod_base = OTHER; note = 2'-O-Methyl-adenosine phosphorothioate
  modified_base 3: mod_base = OTHER; note = 2'-O-Methyl-guanosine
  modified_base 21: mod_base = OTHER; note = 2'-O-Methyl-guanosine
  modified_base 25: mod_base = OTHER; note = uridine phosphorothioate
  modified_base 28: mod_base = OTHER; note = 2'-O-Methyl-adenosine
  modified_base 29: mod_base = OTHER; note = 2'-O-Methyl-guanosine
  modified_base 30: mod_base = OTHER; note = 2'-O-Methyl-cytidine
  modified_base 31: mod_base = OTHER; note = 2'-O-Methyl-uridine
  modified_base 32: mod_base = OTHER; note = 2'-O-Methyl-adenosine
  modified_base 33: mod_base = OTHER; note = 2'-O-Methyl-guanosine
  modified_base 34: mod_base = OTHER; note = 2'-O-Methyl-adenosine
  modified_base 35: mod_base = OTHER; note = 2'-O-Methyl-adenosine
  modified_base 36: mod_base = OTHER; note = 2'-O-Methyl-adenosine
  modified_base 37: mod_base = OTHER; note = 2'-O-Methyl-uridine
  modified_base 38: mod_base = OTHER; note = 2'-O-Methyl-adenosine
  modified_base 39: mod_base = OTHER; note = 2'-O-Methyl-guanosine
  modified_base 40: mod_base = OTHER; note = 2'-O-Methyl-cytidine
  modified_base 41: mod_base = OTHER; note = 2'-O-Methyl-adenosine
  modified_base 42: mod_base = OTHER; note = 2'-O-Methyl-adenosine
  modified_base 46: mod_base = OTHER; note = 2'-O-Methyl-adenosine
  modified_base 48: mod_base = OTHER; note = 2'-O-Methyl-adenosine
  modified_base 50: mod_base = OTHER; note = 2'-O-Methyl-uridine
  modified_base 52: mod_base = OTHER; note = 2'-O-Methyl-adenosine
  modified_base 53: mod_base = OTHER; note = 2'-O-Methyl-guanosine
  modified_base 54: mod_base = OTHER; note = 2'-O-Methyl-guanosine
  modified_base 55: mod_base = OTHER; note = 2'-O-Methyl-cytidine
  modified_base 56: mod_base = OTHER; note = 2'-O-Methyl-uridine
  modified_base 57: mod_base = OTHER; note = 2'-O-Methyl-adenosine
  modified_base 60: mod_base = OTHER; note = 2'-O-Methyl-cytidine
  modified_base 61: mod_base = OTHER; note = 2'-O-Methyl-cytidine
  modified_base 66: mod_base = OTHER; note = 2'-O-Methyl-uridine
  modified_base 67: mod_base = OTHER; note = 2'-O-Methyl-cytidine
  modified_base 70: mod_base = OTHER; note = 2'-O-Methyl-cytidine
  modified_base 71: mod_base = OTHER; note = 2'-O-Methyl-uridine
  modified_base 72: mod_base = OTHER; note = 2'-O-Methyl-uridine
  modified_base 74: mod_base = OTHER; note = 2'-O-Methyl-adenosine
  modified_base 75: mod_base = OTHER; note = 2'-O-Methyl-adenosine
  modified_base 76: mod_base = OTHER; note = 2'-O-Methyl-adenosine
  modified_base 77: mod_base = OTHER; note = 2'-O-Methyl-adenosine
  modified_base 78: mod_base = OTHER; note = 2'-O-Methyl-adenosine
  modified_base 79: mod_base = OTHER; note = 2'-O-Methyl-guanosine
  modified_base 80: mod_base = OTHER; note = 2'-O-Methyl-uridine
  modified_base 82: mod_base = OTHER; note = 2'-O-Methyl-guanosine
  modified_base 83: mod_base = OTHER; note = 2'-O-Methyl-cytidine
  modified_base 84: mod_base = OTHER; note = 2'-O-Methyl-adenosine
  modified_base 85: mod_base = OTHER; note = 2'-O-Methyl-cytidine
  modified_base 86: mod_base = OTHER; note = 2'-O-Methyl-cytidine
  modified_base 87: mod_base = OTHER; note = 2'-O-Methyl-guanosine
  modified_base 89: mod_base = OTHER; note = 2'-O-Methyl-guanosine
  modified_base 92: mod_base = OTHER; note = 2'-O-Methyl-guanosine
  modified_base 93: mod_base = OTHER; note = 2'-O-Methyl-guanosine
  modified_base 94: mod_base = OTHER; note = 2'-O-Methyl-uridine
  modified_base 95: mod_base = OTHER; note = 2'-O-Methyl-guanosine
  modified_base 96: mod_base = OTHER; note = 2'-O-Methyl-cytidine
  modified_base 97: mod_base = OTHER; note = 2'-O-Methyl-uridine phosphorothioate
  modified_base 98: mod_base = OTHER; note = 2'-O-Methyl-uridine phosphorothioate
  modified_base 99: mod_base = OTHER; note = 2'-O-Methyl-uridine phosphorothioate
  modified_base 100: mod_base = OTHER; note = 2'-O-Methyl-uridine
  misc_difference 101: note = a, c, g, inosine, u, deoxyadenosine, deoxyguanosine, deoxycytidine, deoxyinosine, thymine, ribonebularine, 2'-O-methylnebularine, or 2'-deoxynebularine
  misc_difference 102: note = a, c, g, inosine, u, deoxyadenosine, deoxyguanosine, deoxycytidine, deoxyinosine, thymine, ribonebularine, 2'-O-methylnebularine, or 2'-deoxynebularine
  misc_difference 103: note = a, c, g, inosine, u, deoxyadenosine, deoxyguanosine, deoxycytidine, deoxyinosine, thymine, ribonebularine, 2'-O-methylnebularine, or 2'-deoxynebularine

SEQ ID NO: 2888 - RNA, 103 nt, synthetic construct; identical to SEQ ID NO: 1797
  source 1..103: mol_type = other RNA
  modified_base 1: mod_base = OTHER; note = 2'-O-Methyl-cytidine phosphorothioate
  modified_base 2: mod_base = OTHER; note = 2'-O-Methyl-adenosine phosphorothioate
  modified_base 3: mod_base = OTHER; note = 2'-O-Methyl-guanosine
  modified_base 21: mod_base = OTHER; note = 2'-O-Methyl-guanosine
  modified_base 25: mod_base = OTHER; note = uridine phosphorothioate
  modified_base 28: mod_base = OTHER; note = 2'-O-Methyl-adenosine
  modified_base 29: mod_base = OTHER; note = 2'-O-Methyl-guanosine
  modified_base 30: mod_base = OTHER; note = 2'-O-Methyl-cytidine
  modified_base 31: mod_base = OTHER; note = 2'-O-Methyl-uridine
  modified_base 32: mod_base = OTHER; note = 2'-O-Methyl-adenosine
  modified_base 33: mod_base = OTHER; note = 2'-O-Methyl-guanosine
  modified_base 34: mod_base = OTHER; note = 2'-O-Methyl-adenosine
  modified_base 35: mod_base = OTHER; note = 2'-O-Methyl-adenosine
  modified_base 36: mod_base = OTHER; note = 2'-O-Methyl-adenosine
  modified_base 37: mod_base = OTHER; note = 2'-O-Methyl-uridine
  modified_base 38: mod_base = OTHER; note = 2'-O-Methyl-adenosine
  modified_base 39: mod_base = OTHER; note = 2'-O-Methyl-guanosine
  modified_base 40: mod_base = OTHER; note = 2'-O-Methyl-cytidine
  modified_base 41: mod_base = OTHER; note = 2'-O-Methyl-adenosine
  modified_base 42: mod_base = OTHER; note = 2'-O-Methyl-adenosine
  modified_base 46: mod_base = OTHER; note = 2'-O-Methyl-adenosine
  modified_base 48: mod_base = OTHER; note = 2'-O-Methyl-adenosine
  modified_base 50: mod_base = OTHER; note = 2'-O-Methyl-uridine
  modified_base 52: mod_base = OTHER; note = 2'-O-Methyl-adenosine
  modified_base 53: mod_base = OTHER; note = 2'-O-Methyl-guanosine
  modified_base 54: mod_base = OTHER; note = 2'-O-Methyl-guanosine
  modified_base 57: mod_base = OTHER; note = 2'-O-Methyl-adenosine
  modified_base 61: mod_base = OTHER; note = 2'-O-Methyl-cytidine
  modified_base 66: mod_base = OTHER; note = 2'-O-Methyl-uridine
  modified_base 67: mod_base = OTHER; note = 2'-O-Methyl-cytidine
  modified_base 70: mod_base = OTHER; note = 2'-O-Methyl-cytidine
  modified_base 71: mod_base = OTHER; note = 2'-O-Methyl-uridine
  modified_base 72: mod_base = OTHER; note = 2'-O-Methyl-uridine
  modified_base 73: mod_base = OTHER; note = 2'-O-Methyl-guanosine
  modified_base 74: mod_base = OTHER; note = 2'-O-Methyl-adenosine
  modified_base 75: mod_base = OTHER; note = 2'-O-Methyl-adenosine
  modified_base 76: mod_base = OTHER; note = 2'-O-Methyl-adenosine
  modified_base 77: mod_base = OTHER; note = 2'-O-Methyl-adenosine
  modified_base 78: mod_base = OTHER; note = 2'-O-Methyl-adenosine
  modified_base 79: mod_base = OTHER; note = 2'-O-Methyl-guanosine
  modified_base 80: mod_base = OTHER; note = 2'-O-Methyl-uridine
  modified_base 82: mod_base = OTHER; note = 2'-O-Methyl-guanosine
  modified_base 83: mod_base = OTHER; note = 2'-O-Methyl-cytidine
  modified_base 84: mod_base = OTHER; note = 2'-O-Methyl-adenosine
  modified_base 85: mod_base = OTHER; note = 2'-O-Methyl-cytidine
  modified_base 86: mod_base = OTHER; note = 2'-O-Methyl-cytidine
  modified_base 87: mod_base = OTHER; note = 2'-O-Methyl-guanosine
  modified_base 89: mod_base = OTHER; note = 2'-O-Methyl-guanosine
  modified_base 92: mod_base = OTHER; note = 2'-O-Methyl-guanosine
  modified_base 93: mod_base = OTHER; note = 2'-O-Methyl-guanosine
  modified_base 94: mod_base = OTHER; note = 2'-O-Methyl-uridine
  modified_base 95: mod_base = OTHER; note = 2'-O-Methyl-guanosine
  modified_base 96: mod_base = OTHER; note = 2'-O-Methyl-cytidine
  modified_base 97: mod_base = OTHER; note = 2'-O-Methyl-uridine phosphorothioate
  modified_base 98: mod_base = OTHER; note = 2'-O-Methyl-uridine phosphorothioate
  modified_base 99: mod_base = OTHER; note = 2'-O-Methyl-uridine phosphorothioate
  modified_base 100: mod_base = OTHER; note = 2'-O-Methyl-uridine
  misc_difference 101: note = a, c, g, inosine, u, deoxyadenosine, deoxyguanosine, deoxycytidine, deoxyinosine, thymine, ribonebularine, 2'-O-methylnebularine, or 2'-deoxynebularine
  misc_difference 102: note = a, c, g, inosine, u, deoxyadenosine, deoxyguanosine, deoxycytidine, deoxyinosine, thymine, ribonebularine, 2'-O-methylnebularine, or 2'-deoxynebularine
  misc_difference 103: note = a, c, g, inosine, u, deoxyadenosine, deoxyguanosine, deoxycytidine, deoxyinosine, thymine, ribonebularine, 2'-O-methylnebularine, or 2'-deoxynebularine

SEQ ID NO: 2889 - RNA, 103 nt, synthetic construct; identical to SEQ ID NO: 1797
  source 1..103: mol_type = other RNA
  modified_base 1: mod_base = OTHER; note = 2'-O-Methyl-cytidine phosphorothioate
  modified_base 2: mod_base = OTHER; note = 2'-O-Methyl-adenosine phosphorothioate
  modified_base 3: mod_base = OTHER; note = 2'-O-Methyl-guanosine
  modified_base 21: mod_base = OTHER; note = 2'-O-Methyl-guanosine
  modified_base 25: mod_base = OTHER; note = uridine phosphorothioate
  modified_base 28: mod_base = OTHER; note = 2'-O-Methyl-adenosine
  modified_base 29: mod_base = OTHER; note = 2'-O-Methyl-guanosine
  modified_base 30: mod_base = OTHER; note = 2'-O-Methyl-cytidine
  modified_base 31: mod_base = OTHER; note = 2'-O-Methyl-uridine
  modified_base 32: mod_base = OTHER; note = 2'-O-Methyl-adenosine
  modified_base 33: mod_base = OTHER; note = 2'-O-Methyl-guanosine
  modified_base 34: mod_base = OTHER; note = 2'-O-Methyl-adenosine
  modified_base 35: mod_base = OTHER; note = 2'-O-Methyl-adenosine
  modified_base 36: mod_base = OTHER; note = 2'-O-Methyl-adenosine
  modified_base 37: mod_base = OTHER; note = 2'-O-Methyl-uridine
  modified_base 38: mod_base = OTHER; note = 2'-O-Methyl-adenosine
  modified_base 39: mod_base = OTHER; note = 2'-O-Methyl-guanosine
  modified_base 40: mod_base = OTHER; note = 2'-O-Methyl-cytidine
  modified_base 41: mod_base = OTHER; note = 2'-O-Methyl-adenosine
  modified_base 42: mod_base = OTHER; note = 2'-O-Methyl-adenosine
  modified_base 46: mod_base = OTHER; note = 2'-O-Methyl-adenosine
  modified_base 48: mod_base = OTHER; note = 2'-O-Methyl-adenosine
  modified_base 50: mod_base = OTHER; note = 2'-O-Methyl-uridine
  modified_base 52: mod_base = OTHER; note = 2'-O-Methyl-adenosine
  modified_base 53: mod_base = OTHER; note = 2'-O-Methyl-guanosine
  modified_base 54: mod_base = OTHER; note = 2'-O-Methyl-guanosine
  modified_base 57: mod_base = OTHER; note = 2'-O-Methyl-adenosine
  modified_base 61: mod_base = OTHER; note = 2'-O-Methyl-cytidine
  modified_base 66: mod_base = OTHER; note = 2'-O-Methyl-uridine
  modified_base 67: mod_base = OTHER; note = 2'-O-Methyl-cytidine
  modified_base 70: mod_base = OTHER; note = 2'-O-Methyl-cytidine
  modified_base 71: mod_base = OTHER; note = 2'-O-Methyl-uridine
  modified_base 72: mod_base = OTHER; note = 2'-O-Methyl-uridine
  modified_base 73: mod_base = OTHER; note = 2'-O-Methyl-guanosine
  modified_base 74: mod_base = OTHER; note = 2'-O-Methyl-adenosine
  modified_base 75: mod_base = OTHER; note = 2'-O-Methyl-adenosine
  modified_base 76: mod_base = OTHER; note = 2'-O-Methyl-adenosine
  modified_base 77: mod_base = OTHER; note = 2'-O-Methyl-adenosine
  modified_base 78: mod_base = OTHER; note = 2'-O-Methyl-adenosine
  modified_base 79: mod_base = OTHER; note = 2'-O-Methyl-guanosine
  modified_base 80: mod_base = OTHER; note = 2'-O-Methyl-uridine
  modified_base 82: mod_base = OTHER; note = 2'-O-Methyl-guanosine
  modified_base 83: mod_base = OTHER; note = 2'-O-Methyl-cytidine
  modified_base 84: mod_base = OTHER; note = 2'-O-Methyl-adenosine
  modified_base 85: mod_base = OTHER; note = 2'-O-Methyl-cytidine
  modified_base 86: mod_base = OTHER; note = 2'-O-Methyl-cytidine
  modified_base 87: mod_base = OTHER; note = 2'-O-Methyl-guanosine
  modified_base 89: mod_base = OTHER; note = 2'-O-Methyl-guanosine
  modified_base 91: mod_base = OTHER; note = 2'-O-Methyl-cytidine
  modified_base 92: mod_base = OTHER; note = 2'-O-Methyl-guanosine
  modified_base 93: mod_base = OTHER; note = 2'-O-Methyl-guanosine
  modified_base 94: mod_base = OTHER; note = 2'-O-Methyl-uridine
  modified_base 95: mod_base = OTHER; note = 2'-O-Methyl-guanosine
  modified_base 96: mod_base = OTHER; note = 2'-O-Methyl-cytidine
  modified_base 97: mod_base = OTHER; note = 2'-O-Methyl-uridine phosphorothioate
  modified_base 98: mod_base = OTHER; note = 2'-O-Methyl-uridine phosphorothioate
  modified_base 99: mod_base = OTHER; note = 2'-O-Methyl-uridine phosphorothioate
  modified_base 100: mod_base = OTHER; note = 2'-O-Methyl-uridine
  misc_difference 101: note = a, c, g, inosine, u, deoxyadenosine, deoxyguanosine, deoxycytidine, deoxyinosine, thymine, ribonebularine, 2'-O-methylnebularine, or 2'-deoxynebularine
  misc_difference 102: note = a, c, g, inosine, u, deoxyadenosine, deoxyguanosine, deoxycytidine, deoxyinosine, thymine, ribonebularine, 2'-O-methylnebularine, or 2'-deoxynebularine
  misc_difference 103: note = a, c, g, inosine, u, deoxyadenosine, deoxyguanosine, deoxycytidine, deoxyinosine, thymine, ribonebularine, 2'-O-methylnebularine, or 2'-deoxynebularine

SEQ ID NO: 2890 - RNA, 103 nt, synthetic construct; identical to SEQ ID NO: 1797
  source 1..103: mol_type = other RNA
  modified_base 1: mod_base = OTHER; note = 2'-O-Methyl-cytidine phosphorothioate
  modified_base 2: mod_base = OTHER; note = 2'-O-Methyl-adenosine phosphorothioate
  modified_base 3: mod_base = OTHER; note = 2'-O-Methyl-guanosine
  modified_base 21: mod_base = OTHER; note = 2'-O-Methyl-guanosine
  modified_base 25: mod_base = OTHER; note = uridine phosphorothioate
  modified_base 28: mod_base = OTHER; note = 2'-O-Methyl-adenosine
  modified_base 29: mod_base = OTHER; note = 2'-O-Methyl-guanosine
  modified_base 30: mod_base = OTHER; note = 2'-O-Methyl-cytidine
  modified_base 31: mod_base = OTHER; note = 2'-O-Methyl-uridine
  modified_base 32: mod_base = OTHER; note = 2'-O-Methyl-adenosine
  modified_base 34: mod_base = OTHER; note = 2'-O-Methyl-adenosine
  modified_base 35: mod_base = OTHER; note = 2'-O-Methyl-adenosine
  modified_base 36: mod_base = OTHER; note = 2'-O-Methyl-adenosine
  modified_base 37: mod_base = OTHER; note = 2'-O-Methyl-uridine
  modified_base 38: mod_base = OTHER; note = 2'-O-Methyl-adenosine
  modified_base 39: mod_base = OTHER; note = 2'-O-Methyl-guanosine
  modified_base 40: mod_base = OTHER; note = 2'-O-Methyl-cytidine
  modified_base 41: mod_base = OTHER; note = 2'-O-Methyl-adenosine
  modified_base 42: mod_base = OTHER; note = 2'-O-Methyl-adenosine
  modified_base 46: mod_base = OTHER; note = 2'-O-Methyl-adenosine
  modified_base 48: mod_base = OTHER; note = 2'-O-Methyl-adenosine
  modified_base 50: mod_base = OTHER; note = 2'-O-Methyl-uridine
  modified_base 52: mod_base = OTHER; note = 2'-O-Methyl-adenosine
  modified_base 53: mod_base = OTHER; note = 2'-O-Methyl-guanosine
  modified_base 54: mod_base = OTHER; note = 2'-O-Methyl-guanosine
  modified_base 57: mod_base = OTHER; note = 2'-O-Methyl-adenosine
  modified_base 61: mod_base = OTHER; note = 2'-O-Methyl-cytidine
  modified_base 66: mod_base = OTHER; note = 2'-O-Methyl-uridine
  modified_base 67: mod_base = OTHER; note = 2'-O-Methyl-cytidine
  modified_base 70: mod_base = OTHER; note = 2'-O-Methyl-cytidine
  modified_base 71: mod_base = OTHER; note = 2'-O-Methyl-uridine
  modified_base 72: mod_base = OTHER; note = 2'-O-Methyl-uridine
  modified_base 73: mod_base = OTHER; note = 2'-O-Methyl-guanosine
  modified_base 74: mod_base = OTHER; note = 2'-O-Methyl-adenosine
  modified_base 75: mod_base = OTHER; note = 2'-O-Methyl-adenosine
  modified_base 76: mod_base = OTHER; note = 2'-O-Methyl-adenosine
  modified_base 77: mod_base = OTHER; note = 2'-O-Methyl-adenosine
  modified_base 78: mod_base = OTHER; note = 2'-O-Methyl-adenosine
  modified_base 79: mod_base = OTHER; note = 2'-O-Methyl-guanosine
  modified_base 80: mod_base = OTHER; note = 2'-O-Methyl-uridine
  modified_base 82: mod_base = OTHER; note = 2'-O-Methyl-guanosine
  modified_base 83: mod_base = OTHER; note = 2'-O-Methyl-cytidine
  modified_base 84: mod_base = OTHER; note = 2'-O-Methyl-adenosine
  modified_base 85: mod_base = OTHER; note = 2'-O-Methyl-cytidine
  modified_base 86: mod_base = OTHER; note = 2'-O-Methyl-cytidine
  modified_base 87: mod_base = OTHER; note = 2'-O-Methyl-guanosine
  modified_base 89: mod_base = OTHER; note = 2'-O-Methyl-guanosine
  modified_base 92: mod_base = OTHER; note = 2'-O-Methyl-guanosine
  modified_base 93: mod_base = OTHER; note = 2'-O-Methyl-guanosine
  modified_base 94: mod_base = OTHER; note = 2'-O-Methyl-uridine
  modified_base 95: mod_base = OTHER; note = 2'-O-Methyl-guanosine
  modified_base 96: mod_base = OTHER; note = 2'-O-Methyl-cytidine
  modified_base 97: mod_base = OTHER; note = 2'-O-Methyl-uridine phosphorothioate
  modified_base 98: mod_base = OTHER; note = 2'-O-Methyl-uridine phosphorothioate
  modified_base 99: mod_base = OTHER; note = 2'-O-Methyl-uridine phosphorothioate
  modified_base 100: mod_base = OTHER; note = 2'-O-Methyl-uridine
  misc_difference 101: note = a, c, g, inosine, u, deoxyadenosine, deoxyguanosine, deoxycytidine, deoxyinosine, thymine, ribonebularine, 2'-O-methylnebularine, or 2'-deoxynebularine
  misc_difference 102: note = a, c, g, inosine, u, deoxyadenosine, deoxyguanosine, deoxycytidine, deoxyinosine, thymine, ribonebularine, 2'-O-methylnebularine, or 2'-deoxynebularine
  misc_difference 103: note = a, c, g, inosine, u, deoxyadenosine, deoxyguanosine, deoxycytidine, deoxyinosine, thymine, ribonebularine, 2'-O-methylnebularine, or 2'-deoxynebularine

SEQ ID NO: 2891 - RNA, 103 nt, synthetic construct; identical to SEQ ID NO: 1797
  source 1..103: mol_type = other RNA
  modified_base 1: mod_base = OTHER; note = 2'-O-Methyl-cytidine phosphorothioate
  modified_base 2: mod_base = OTHER; note = 2'-O-Methyl-adenosine phosphorothioate
  modified_base 3: mod_base = OTHER; note = 2'-O-Methyl-guanosine
  modified_base 21: mod_base = OTHER; note = 2'-O-Methyl-guanosine
  modified_base 25: mod_base = OTHER; note = uridine phosphorothioate
  modified_base 28: mod_base = OTHER; note = 2'-O-Methyl-adenosine
  modified_base 29: mod_base = OTHER; note = 2'-O-Methyl-guanosine
  modified_base 30: mod_base = OTHER; note = 2'-O-Methyl-cytidine
  modified_base 31: mod_base = OTHER; note = 2'-O-Methyl-uridine
  modified_base 32: mod_base = OTHER; note = 2'-O-Methyl-adenosine
  modified_base 34: mod_base = OTHER; note = 2'-O-Methyl-adenosine
  modified_base 35: mod_base = OTHER; note = 2'-O-Methyl-adenosine
  modified_base 36: mod_base = OTHER; note = 2'-O-Methyl-adenosine
  modified_base 37: mod_base = OTHER; note = 2'-O-Methyl-uridine
  modified_base 38: mod_base = OTHER; note = 2'-O-Methyl-adenosine
  modified_base 39: mod_base = OTHER; note = 2'-O-Methyl-guanosine
  modified_base 40: mod_base = OTHER; note = 2'-O-Methyl-cytidine
  modified_base 41: mod_base = OTHER; note = 2'-O-Methyl-adenosine
  modified_base 42: mod_base = OTHER; note = 2'-O-Methyl-adenosine
  modified_base 46: mod_base = OTHER; note = 2'-O-Methyl-adenosine
  modified_base 48: mod_base = OTHER; note = 2'-O-Methyl-adenosine
  modified_base 50: mod_base = OTHER; note = 2'-O-Methyl-uridine
  modified_base 52: mod_base = OTHER; note = 2'-O-Methyl-adenosine
  modified_base 53: mod_base = OTHER; note = 2'-O-Methyl-guanosine
  modified_base 54: mod_base = OTHER; note = 2'-O-Methyl-guanosine
  modified_base 57: mod_base = OTHER; note = 2'-O-Methyl-adenosine
  modified_base 61: mod_base = OTHER; note = 2'-O-Methyl-cytidine
  modified_base 66: mod_base = OTHER; note = 2'-O-Methyl-uridine
  modified_base 67: mod_base = OTHER; note = 2'-O-Methyl-cytidine
  modified_base 70: mod_base = OTHER; note = 2'-O-Methyl-cytidine
  modified_base 71: mod_base = OTHER; note = 2'-O-Methyl-uridine
  modified_base 72: mod_base = OTHER; note = 2'-O-Methyl-uridine
  modified_base 73: mod_base = OTHER; note = 2'-O-Methyl-guanosine
  modified_base 74: mod_base = OTHER; note = 2'-O-Methyl-adenosine
  modified_base 75: mod_base = OTHER; note = 2'-O-Methyl-adenosine
  modified_base 76: mod_base = OTHER; note = 2'-O-Methyl-adenosine
  modified_base 77: mod_base = OTHER; note = 2'-O-Methyl-adenosine
  modified_base 78: mod_base = OTHER; note = 2'-O-Methyl-adenosine
  modified_base 79: mod_base = OTHER; note = 2'-O-Methyl-guanosine
  modified_base 80: mod_base = OTHER; note = 2'-O-Methyl-uridine
  modified_base 82: mod_base = OTHER; note = 2'-O-Methyl-guanosine
  modified_base 83: mod_base = OTHER; note = 2'-O-Methyl-cytidine
  modified_base 84: mod_base = OTHER; note = 2'-O-Methyl-adenosine
  modified_base 85: mod_base = OTHER; note = 2'-O-Methyl-cytidine
  modified_base 86: mod_base = OTHER; note = 2'-O-Methyl-cytidine
  modified_base 87: mod_base = OTHER; note = 2'-O-Methyl-guanosine
  modified_base 89: mod_base = OTHER; note = 2'-O-Methyl-guanosine
  modified_base 91: mod_base = OTHER; note = 2'-O-Methyl-cytidine
  modified_base 92: mod_base = OTHER; note = 2'-O-Methyl-guanosine
  modified_base 93: mod_base = OTHER; note = 2'-O-Methyl-guanosine
  modified_base 94: mod_base = OTHER; note = 2'-O-Methyl-uridine
  modified_base 95: mod_base = OTHER; note = 2'-O-Methyl-guanosine
  modified_base 96: mod_base = OTHER; note = 2'-O-Methyl-cytidine
  modified_base 97: mod_base = OTHER; note = 2'-O-Methyl-uridine phosphorothioate
  modified_base 98: mod_base = OTHER; note = 2'-O-Methyl-uridine phosphorothioate
  modified_base 99: mod_base = OTHER; note = 2'-O-Methyl-uridine phosphorothioate
  modified_base 100: mod_base = OTHER; note = 2'-O-Methyl-uridine
  misc_difference 101: note = a, c, g, inosine, u, deoxyadenosine, deoxyguanosine, deoxycytidine, deoxyinosine, thymine, ribonebularine, 2'-O-methylnebularine, or 2'-deoxynebularine
  misc_difference 102: note = a, c, g, inosine, u, deoxyadenosine, deoxyguanosine, deoxycytidine, deoxyinosine, thymine, ribonebularine, 2'-O-methylnebularine, or 2'-deoxynebularine
  misc_difference 103: note = a, c, g, inosine, u, deoxyadenosine, deoxyguanosine, deoxycytidine, deoxyinosine, thymine, ribonebularine, 2'-O-methylnebularine, or 2'-deoxynebularine

SEQ ID NO: 2892 - RNA, 103 nt, synthetic construct; identical to SEQ ID NO: 1797
  source 1..103: mol_type = other RNA
  modified_base 1: mod_base = OTHER; note = 2'-O-Methyl-cytidine phosphorothioate
  modified_base 2: mod_base = OTHER; note = 2'-O-Methyl-adenosine phosphorothioate
  modified_base 3: mod_base = OTHER; note = 2'-O-Methyl-guanosine
  modified_base 21: mod_base = OTHER; note = 2'-O-Methyl-guanosine
  modified_base 25: mod_base = OTHER; note = uridine phosphorothioate
  modified_base 28: mod_base = OTHER; note = 2'-O-Methyl-adenosine
  modified_base 29: mod_base = OTHER; note = 2'-O-Methyl-guanosine
  modified_base 30: mod_base = OTHER; note = 2'-O-Methyl-cytidine
  modified_base 31: mod_base = OTHER; note = 2'-O-Methyl-uridine
  modified_base 32: mod_base = OTHER; note = 2'-O-Methyl-adenosine
  modified_base 34: mod_base = OTHER; note = 2'-O-Methyl-adenosine
  modified_base 35: mod_base = OTHER; note = 2'-O-Methyl-adenosine
  modified_base 36: mod_base = OTHER; note = 2'-O-Methyl-adenosine
  modified_base 37: mod_base = OTHER; note = 2'-O-Methyl-uridine
  modified_base 38: mod_base = OTHER; note = 2'-O-Methyl-adenosine
  modified_base 39: mod_base = OTHER; note = 2'-O-Methyl-guanosine
  modified_base 40: mod_base = OTHER; note = 2'-O-Methyl-cytidine
  modified_base 41: mod_base = OTHER; note = 2'-O-Methyl-adenosine
  modified_base 42: mod_base = OTHER; note = 2'-O-Methyl-adenosine
  modified_base 46: mod_base = OTHER; note = 2'-O-Methyl-adenosine
  modified_base 48: mod_base = OTHER; note = 2'-O-Methyl-adenosine
  modified_base 50: mod_base = OTHER; note = 2'-O-Methyl-uridine
  modified_base 52: mod_base = OTHER; note = 2'-O-Methyl-adenosine
  modified_base 53: mod_base = OTHER; note = 2'-O-Methyl-guanosine
  modified_base 54: mod_base = OTHER; note = 2'-O-Methyl-guanosine
  modified_base 55: mod_base = OTHER; note = 2'-O-Methyl-cytidine
  modified_base 56: mod_base = OTHER; note = 2'-O-Methyl-uridine
  modified_base 57: mod_base = OTHER; note = 2'-O-Methyl-adenosine
  modified_base 60: mod_base = OTHER; note = 2'-O-Methyl-cytidine
  modified_base 61: mod_base = OTHER; note = 2'-O-Methyl-cytidine
  modified_base 66: mod_base = OTHER; note = 2'-O-Methyl-uridine
  modified_base 67: mod_base = OTHER; note = 2'-O-Methyl-cytidine
  modified_base 70: mod_base = OTHER; note = 2'-O-Methyl-cytidine
  modified_base 71: mod_base = OTHER; note = 2'-O-Methyl-uridine
  modified_base 72: mod_base = OTHER; note = 2'-O-Methyl-uridine
  modified_base 74: mod_base = OTHER; note = 2'-O-Methyl-adenosine
  modified_base 75: mod_base = OTHER; note = 2'-O-Methyl-adenosine
  modified_base 76: mod_base = OTHER; note = 2'-O-Methyl-adenosine
  modified_base 77: mod_base = OTHER; note = 2'-O-Methyl-adenosine
  modified_base 78: mod_base = OTHER; note = 2'-O-Methyl-adenosine
  modified_base 79: mod_base = OTHER; note = 2'-O-Methyl-guanosine
  modified_base 80: mod_base = OTHER; note = 2'-O-Methyl-uridine
  modified_base 82: mod_base = OTHER; note = 2'-O-Methyl-guanosine
  modified_base 83: mod_base = OTHER; note = 2'-O-Methyl-cytidine
  modified_base 84: mod_base = OTHER; note = 2'-O-Methyl-adenosine
  modified_base 85: mod_base = OTHER; note = 2'-O-Methyl-cytidine
  modified_base 86: mod_base = OTHER; note = 2'-O-Methyl-cytidine
  modified_base 87: mod_base = OTHER; note = 2'-O-Methyl-guanosine
  modified_base 89: mod_base = OTHER; note = 2'-O-Methyl-guanosine
  modified_base 92: mod_base = OTHER; note = 2'-O-Methyl-guanosine
  modified_base 93: mod_base = OTHER; note = 2'-O-Methyl-guanosine
  modified_base 94: mod_base = OTHER; note = 2'-O-Methyl-uridine
  modified_base 95: mod_base = OTHER; note = 2'-O-Methyl-guanosine
  modified_base 96: mod_base = OTHER; note = 2'-O-Methyl-cytidine
  modified_base 97: mod_base = OTHER; note = 2'-O-Methyl-uridine phosphorothioate
  modified_base 98: mod_base = OTHER; note = 2'-O-Methyl-uridine phosphorothioate
  modified_base 99: mod_base = OTHER; note = 2'-O-Methyl-uridine phosphorothioate
  modified_base 100: mod_base = OTHER; note = 2'-O-Methyl-uridine
  misc_difference 101: note = a, c, g, inosine, u, deoxyadenosine, deoxyguanosine, deoxycytidine, deoxyinosine, thymine, ribonebularine, 2'-O-methylnebularine, or 2'-deoxynebularine
  misc_difference 102: note = a, c, g, inosine, u, deoxyadenosine, deoxyguanosine, deoxycytidine, deoxyinosine, thymine, ribonebularine, 2'-O-methylnebularine, or 2'-deoxynebularine
  misc_difference 103: note = a, c, g, inosine, u, deoxyadenosine, deoxyguanosine, deoxycytidine, deoxyinosine, thymine, ribonebularine, 2'-O-methylnebularine, or 2'-deoxynebularine

SEQ ID NO: 2893 - RNA, 103 nt, synthetic construct; identical to SEQ ID NO: 1795
  source 1..103: mol_type = other RNA
  modified_base 1: mod_base = OTHER; note = 2'-O-Methyl-cytidine phosphorothioate
  modified_base 2: mod_base = OTHER; note = 2'-O-Methyl-cytidine phosphorothioate
  modified_base 3: mod_base = OTHER; note = 2'-O-Methyl-cytidine
  modified_base 21: mod_base = OTHER; note = 2'-O-Methyl-guanosine
  modified_base 28: mod_base = OTHER; note = 2'-O-Methyl-adenosine
  modified_base 29: mod_base = OTHER; note = 2'-O-Methyl-guanosine
  modified_base 30: mod_base = OTHER; note = 2'-O-Methyl-cytidine
  modified_base 31: mod_base = OTHER; note = 2'-O-Methyl-uridine
  modified_base 32: mod_base = OTHER; note = 2'-O-Methyl-adenosine
  modified_base 33: mod_base = OTHER; note = 2'-O-Methyl-guanosine
  modified_base 34: mod_base = OTHER; note = 2'-O-Methyl-adenosine
  modified_base 35: mod_base = OTHER; note = 2'-O-Methyl-adenosine
  modified_base 36: mod_base = OTHER; note = 2'-O-Methyl-adenosine
  modified_base 37: mod_base = OTHER; note = 2'-O-Methyl-uridine
  modified_base 38: mod_base = OTHER; note = 2'-O-Methyl-adenosine
  modified_base 39: mod_base = OTHER; note = 2'-O-Methyl-guanosine
  modified_base 40: mod_base = OTHER; note = 2'-O-Methyl-cytidine
  modified_base 41: mod_base = OTHER; note = 2'-O-Methyl-adenosine
  modified_base 42: mod_base = OTHER; note = 2'-O-Methyl-adenosine
  modified_base 45: mod_base = OTHER; note = uridine phosphorothioate
  modified_base 46: mod_base = OTHER; note = 2'-O-Methyl-adenosine
  modified_base 48: mod_base = OTHER; note = 2'-O-Methyl-adenosine
  modified_base 50: mod_base = OTHER; note = 2'-O-Methyl-uridine
  modified_base 52: mod_base = OTHER; note = 2'-O-Methyl-adenosine
  modified_base 53: mod_base = OTHER; note = 2'-O-Methyl-guanosine
  modified_base 54: mod_base = OTHER; note = 2'-O-Methyl-guanosine
  modified_base 55: mod_base = OTHER; note = 2'-O-Methyl-cytidine
  modified_base 56: mod_base = OTHER; note = 2'-O-Methyl-uridine
  modified_base 57: mod_base = OTHER; note = 2'-O-Methyl-adenosine
  modified_base 60: mod_base = OTHER; note = 2'-O-Methyl-cytidine
  modified_base 61: mod_base = OTHER; note = 2'-O-Methyl-cytidine
  modified_base 64: mod_base = OTHER; note = uridine phosphorothioate
  modified_base 66: mod_base = OTHER; note = 2'-O-Methyl-uridine
  modified_base 67: mod_base = OTHER; note = 2'-O-Methyl-cytidine
  modified_base 70: mod_base = OTHER; note = 2'-O-Methyl-cytidine
  modified_base 71: mod_base = OTHER; note = 2'-O-Methyl-uridine
  modified_base 72: mod_base = OTHER; note = 2'-O-Methyl-uridine
  modified_base 73: mod_base = OTHER; note = 2'-O-Methyl-guanosine
  modified_base 74: mod_base = OTHER; note = 2'-O-Methyl-adenosine
  modified_base 75: mod_base = OTHER; note = 2'-O-Methyl-adenosine
  modified_base 76: mod_base = OTHER; note = 2'-O-Methyl-adenosine
  modified_base 77: mod_base = OTHER; note = 2'-O-Methyl-adenosine
  modified_base 78: mod_base = OTHER; note = 2'-O-Methyl-adenosine
  modified_base 79: mod_base = OTHER; note = 2'-O-Methyl-guanosine
  modified_base 80: mod_base = OTHER; note = 2'-O-Methyl-uridine
  modified_base 81: mod_base = OTHER; note = 2'-O-Methyl-guanosine
  modified_base 83: mod_base = OTHER; note = 2'-O-Methyl-cytidine
  modified_base 84: mod_base = OTHER; note = 2'-O-Methyl-adenosine
  modified_base 85: mod_base = OTHER; note = 2'-O-Methyl-cytidine
  modified_base 86: mod_base = OTHER; note = 2'-O-Methyl-cytidine
  modified_base 87: mod_base = OTHER; note = 2'-O-Methyl-guanosine
  modified_base 88: mod_base = OTHER; note = 2'-O-Methyl-adenosine
  modified_base 89: mod_base = OTHER; note = 2'-O-Methyl-guanosine
  modified_base 90: mod_base = OTHER; note = 2'-O-Methyl-uridine
  modified_base 91: mod_base = OTHER; note = 2'-O-Methyl-cytidine
  modified_base 92: mod_base = OTHER; note = 2'-O-Methyl-guanosine
  modified_base 93: mod_base = OTHER; note = 2'-O-Methyl-guanosine
  modified_base 94: mod_base = OTHER; note = 2'-O-Methyl-uridine
  modified_base 95: mod_base = OTHER; note = 2'-O-Methyl-guanosine
  modified_base 96: mod_base = OTHER; note = 2'-O-Methyl-cytidine
  modified_base 97: mod_base = OTHER; note = 2'-O-Methyl-uridine phosphorothioate
  modified_base 98: mod_base = OTHER; note = 2'-O-Methyl-uridine phosphorothioate
  modified_base 99: mod_base = OTHER; note = 2'-O-Methyl-uridine phosphorothioate
  modified_base 100: mod_base = OTHER; note = 2'-O-Methyl-uridine
  misc_difference 101: note = a, c, g, inosine, u, deoxyadenosine, deoxyguanosine, deoxycytidine, deoxyinosine, thymine, ribonebularine, 2'-O-methylnebularine, or 2'-deoxynebularine
  misc_difference 102: note = a, c, g, inosine, u, deoxyadenosine, deoxyguanosine, deoxycytidine, deoxyinosine, thymine, ribonebularine, 2'-O-methylnebularine, or 2'-deoxynebularine
  misc_difference 103: note = a, c, g, inosine, u, deoxyadenosine, deoxyguanosine, deoxycytidine, deoxyinosine, thymine, ribonebularine, 2'-O-methylnebularine, or 2'-deoxynebularine

SEQ ID NO: 2894 - RNA, 103 nt, synthetic construct; identical to SEQ ID NO: 1795
  source 1..103: mol_type = other RNA
  modified_base 1: mod_base = OTHER; note = 2'-O-Methyl-cytidine phosphorothioate
  modified_base 2: mod_base = OTHER; note = 2'-O-Methyl-cytidine phosphorothioate
  modified_base 3: mod_base = OTHER; note = 2'-O-Methyl-cytidine
  modified_base 21: mod_base = OTHER; note = 2'-O-Methyl-guanosine
  modified_base 28: mod_base = OTHER; note = 2'-O-Methyl-adenosine
  modified_base 29: mod_base = OTHER; note = 2'-O-Methyl-guanosine
  modified_base 30: mod_base = OTHER; note = 2'-O-Methyl-cytidine
  modified_base 31: mod_base = OTHER; note = 2'-O-Methyl-uridine
  modified_base 32: mod_base = OTHER; note = 2'-O-Methyl-adenosine
  modified_base 34: mod_base = OTHER; note = 2'-O-Methyl-adenosine
  modified_base 35: mod_base = OTHER; note = 2'-O-Methyl-adenosine
  modified_base 36: mod_base = OTHER; note = 2'-O-Methyl-adenosine
  modified_base 37: mod_base = OTHER; note = 2'-O-Methyl-uridine
  modified_base 38: mod_base = OTHER; note = 2'-O-Methyl-adenosine
  modified_base 39: mod_base = OTHER; note = 2'-O-Methyl-guanosine
  modified_base 40: mod_base = OTHER; note = 2'-O-Methyl-cytidine
  modified_base 41: mod_base = OTHER; note = 2'-O-Methyl-adenosine
  modified_base 42: mod_base = OTHER; note = 2'-O-Methyl-adenosine
  modified_base 45: mod_base = OTHER; note = uridine phosphorothioate
  modified_base 46: mod_base = OTHER; note = 2'-O-Methyl-adenosine
  modified_base 48: mod_base = OTHER; note = 2'-O-Methyl-adenosine
  modified_base 50: mod_base = OTHER; note = 2'-O-Methyl-uridine
  modified_base 52: mod_base = OTHER; note = 2'-O-Methyl-adenosine
  modified_base 53: mod_base = OTHER; note = 2'-O-Methyl-guanosine
  modified_base 54: mod_base = OTHER; note = 2'-O-Methyl-guanosine
  modified_base 55: mod_base = OTHER; note = 2'-O-Methyl-cytidine
  modified_base 56: mod_base = OTHER; note = 2'-O-Methyl-uridine
  modified_base 57: mod_base = OTHER; note = 2'-O-Methyl-adenosine
  modified_base 60: mod_base = OTHER; note = 2'-O-Methyl-cytidine
  modified_base 61: mod_base = OTHER; note = 2'-O-Methyl-cytidine
  modified_base 64: mod_base = OTHER; note = uridine phosphorothioate
  modified_base 66: mod_base = OTHER; note = 2'-O-Methyl-uridine
  modified_base 67: mod_base = OTHER; note = 2'-O-Methyl-cytidine
  modified_base 70: mod_base = OTHER; note = 2'-O-Methyl-cytidine
  modified_base 71: mod_base = OTHER; note = 2'-O-Methyl-uridine
  modified_base 72: mod_base = OTHER; note = 2'-O-Methyl-uridine
  modified_base 74: mod_base = OTHER; note = 2'-O-Methyl-adenosine
  modified_base 75: mod_base = OTHER; note = 2'-O-Methyl-adenosine
  modified_base 76: mod_base = OTHER; note = 2'-O-Methyl-adenosine
  modified_base 77: mod_base = OTHER; note = 2'-O-Methyl-adenosine
  modified_base 78: mod_base = OTHER; note = 2'-O-Methyl-adenosine
  modified_base 79: mod_base = OTHER; note = 2'-O-Methyl-guanosine
  modified_base 80: mod_base = OTHER; note = 2'-O-Methyl-uridine
  modified_base 81: mod_base = OTHER; note = 2'-O-Methyl-guanosine
  modified_base 83: mod_base = OTHER; note = 2'-O-Methyl-cytidine
  modified_base 84: mod_base = OTHER; note = 2'-O-Methyl-adenosine
  modified_base 85: mod_base = OTHER; note = 2'-O-Methyl-cytidine
  modified_base 86: mod_base = OTHER; note = 2'-O-Methyl-cytidine
  modified_base 87: mod_base = OTHER; note = 2'-O-Methyl-guanosine
  modified_base 88: mod_base = OTHER; note = 2'-O-Methyl-adenosine
  modified_base 89: mod_base = OTHER; note = 2'-O-Methyl-guanosine
  modified_base 90: mod_base = OTHER; note = 2'-O-Methyl-uridine
  modified_base 91: mod_base = OTHER; note = 2'-O-Methyl-cytidine
  modified_base 92: mod_base = OTHER; note = 2'-O-Methyl-guanosine
  modified_base 93: mod_base = OTHER; note = 2'-O-Methyl-guanosine
  modified_base 94: mod_base = OTHER; note = 2'-O-Methyl-uridine
  modified_base 95: mod_base = OTHER; note = 2'-O-Methyl-guanosine
  modified_base 96: mod_base = OTHER; note = 2'-O-Methyl-cytidine
  modified_base 97: mod_base = OTHER; note = 2'-O-Methyl-uridine phosphorothioate
  modified_base 98: mod_base = OTHER; note = 2'-O-Methyl-uridine phosphorothioate
  modified_base 99: mod_base = OTHER; note = 2'-O-Methyl-uridine phosphorothioate
  modified_base 100: mod_base = OTHER; note = 2'-O-Methyl-uridine
  misc_difference 101: note = a, c, g, inosine, u, deoxyadenosine, deoxyguanosine, deoxycytidine, deoxyinosine, thymine, ribonebularine, 2'-O-methylnebularine, or 2'-deoxynebularine
  misc_difference 102: note = a, c, g, inosine, u, deoxyadenosine, deoxyguanosine, deoxycytidine, deoxyinosine, thymine, ribonebularine, 2'-O-methylnebularine, or 2'-deoxynebularine
  misc_difference 103: note = a, c, g, inosine, u, deoxyadenosine, deoxyguanosine, deoxycytidine, deoxyinosine, thymine, ribonebularine, 2'-O-methylnebularine, or 2'-deoxynebularine

SEQ ID NO: 2895 - RNA, 103 nt, synthetic construct; identical to SEQ ID NO: 1796
  source 1..103: mol_type = other RNA
  modified_base 1: mod_base = OTHER; note = 2'-O-Methyl-guanosine phosphorothioate
  modified_base 2: mod_base = OTHER; note = 2'-O-Methyl-adenosine phosphorothioate
  modified_base 3: mod_base = OTHER; note = 2'-O-Methyl-guanosine
  modified_base 21: mod_base = OTHER; note = 2'-O-Methyl-guanosine
  modified_base 28: mod_base = OTHER; note = 2'-O-Methyl-adenosine
  modified_base 29: mod_base = OTHER; note = 2'-O-Methyl-guanosine
  modified_base 30: mod_base = OTHER; note = 2'-O-Methyl-cytidine
  modified_base 31: mod_base = OTHER; note = 2'-O-Methyl-uridine
  modified_base 32: mod_base = OTHER; note = 2'-O-Methyl-adenosine
  modified_base 33: mod_base = OTHER; note = 2'-O-Methyl-guanosine
  modified_base 34: mod_base = OTHER; note = 2'-O-Methyl-adenosine
  modified_base 35: mod_base = OTHER; note = 2'-O-Methyl-adenosine
  modified_base 36: mod_base = OTHER; note = 2'-O-Methyl-adenosine
  modified_base 37: mod_base = OTHER; note = 2'-O-Methyl-uridine
  modified_base 38: mod_base = OTHER; note = 2'-O-Methyl-adenosine
  modified_base 39: mod_base = OTHER; note = 2'-O-Methyl-guanosine
  modified_base 40: mod_base = OTHER; note = 2'-O-Methyl-cytidine
  modified_base 41: mod_base = OTHER; note = 2'-O-Methyl-adenosine
  modified_base 42: mod_base = OTHER; note = 2'-O-Methyl-adenosine
  modified_base 45: mod_base = OTHER; note = uridine phosphorothioate
  modified_base 46: mod_base = OTHER; note = 2'-O-Methyl-adenosine
  modified_base 48: mod_base = OTHER; note = 2'-O-Methyl-adenosine
  modified_base 50: mod_base = OTHER; note = 2'-O-Methyl-uridine
  modified_base 52: mod_base = OTHER; note = 2'-O-Methyl-adenosine
  modified_base 53: mod_base = OTHER; note = 2'-O-Methyl-guanosine
  modified_base 54: mod_base = OTHER; note = 2'-O-Methyl-guanosine
  modified_base 55: mod_base = OTHER; note = 2'-O-Methyl-cytidine
  modified_base 56: mod_base = OTHER; note = 2'-O-Methyl-uridine
  modified_base 57: mod_base = OTHER; note = 2'-O-Methyl-adenosine
  modified_base 60: mod_base = OTHER; note = 2'-O-Methyl-cytidine
  modified_base 61: mod_base = OTHER; note = 2'-O-Methyl-cytidine
  modified_base 64: mod_base = OTHER; note = uridine phosphorothioate
  modified_base 66: mod_base = OTHER; note = 2'-O-Methyl-uridine
  modified_base 67: mod_base = OTHER; note = 2'-O-Methyl-cytidine
  modified_base 70: mod_base = OTHER; note = 2'-O-Methyl-cytidine
  modified_base 71: mod_base = OTHER; note = 2'-O-Methyl-uridine
  modified_base 72: mod_base = OTHER; note = 2'-O-Methyl-uridine
  modified_base 73: mod_base = OTHER; note = 2'-O-Methyl-guanosine
  modified_base 74: mod_base = OTHER; note = 2'-O-Methyl-adenosine
  modified_base 75: mod_base = OTHER; note = 2'-O-Methyl-adenosine
  modified_base 76: mod_base = OTHER; note = 2'-O-Methyl-adenosine
  modified_base 77: mod_base = OTHER; note = 2'-O-Methyl-adenosine
  modified_base 78: mod_base = OTHER; note = 2'-O-Methyl-adenosine
  modified_base 79: mod_base = OTHER; note = 2'-O-Methyl-guanosine
  modified_base 80: mod_base = OTHER; note = 2'-O-Methyl-uridine
  modified_base 81: mod_base = OTHER; note = 2'-O-Methyl-guanosine
  modified_base 83: mod_base = OTHER; note = 2'-O-Methyl-cytidine
  modified_base 84: mod_base = OTHER; note = 2'-O-Methyl-adenosine
  modified_base 85: mod_base = OTHER; note = 2'-O-Methyl-cytidine
  modified_base 86: mod_base = OTHER; note = 2'-O-Methyl-cytidine
  modified_base 87: mod_base = OTHER; note = 2'-O-Methyl-guanosine
  modified_base 88: mod_base = OTHER; note = 2'-O-Methyl-adenosine
  modified_base 89: mod_base = OTHER; note = 2'-O-Methyl-guanosine
  modified_base 90: mod_base = OTHER; note = 2'-O-Methyl-uridine
  modified_base 91: mod_base = OTHER; note = 2'-O-Methyl-cytidine
  modified_base 92: mod_base = OTHER; note = 2'-O-Methyl-guanosine
  modified_base 93: mod_base = OTHER; note = 2'-O-Methyl-guanosine
  modified_base 94: mod_base = OTHER; note = 2'-O-Methyl-uridine
  modified_base 95: mod_base = OTHER; note = 2'-O-Methyl-guanosine
  modified_base 96: mod_base = OTHER; note = 2'-O-Methyl-cytidine
  modified_base 97: mod_base = OTHER; note = 2'-O-Methyl-uridine phosphorothioate
  modified_base 98: mod_base = OTHER; note = 2'-O-Methyl-uridine phosphorothioate
  modified_base 99: mod_base = OTHER; note = 2'-O-Methyl-uridine phosphorothioate
  modified_base 100: mod_base = OTHER; note = 2'-O-Methyl-uridine
  misc_difference 101: note = a, c, g, inosine, u, deoxyadenosine, deoxyguanosine, deoxycytidine, deoxyinosine, thymine, ribonebularine, 2'-O-methylnebularine, or 2'-deoxynebularine
  misc_difference 102: note = a, c, g, inosine, u, deoxyadenosine, deoxyguanosine, deoxycytidine, deoxyinosine, thymine, ribonebularine, 2'-O-methylnebularine, or 2'-deoxynebularine
  misc_difference 103: note = a, c, g, inosine, u, deoxyadenosine, deoxyguanosine, deoxycytidine, deoxyinosine, thymine, ribonebularine, 2'-O-methylnebularine, or 2'-deoxynebularine

SEQ ID NO: 2896 - RNA, 103 nt, synthetic construct; identical to SEQ ID NO: 1796
  source 1..103: mol_type = other RNA
  modified_base 1: mod_base = OTHER; note = 2'-O-Methyl-guanosine phosphorothioate
  modified_base 2: mod_base = OTHER; note = 2'-O-Methyl-adenosine phosphorothioate
  modified_base 3: mod_base = OTHER; note = 2'-O-Methyl-guanosine
  modified_base 21: mod_base = OTHER; note = 2'-O-Methyl-guanosine
  modified_base 28: mod_base = OTHER; note = 2'-O-Methyl-adenosine
  modified_base 29: mod_base = OTHER; note = 2'-O-Methyl-guanosine
  modified_base 30: mod_base = OTHER; note = 2'-O-Methyl-cytidine
  modified_base 31: mod_base = OTHER; note = 2'-O-Methyl-uridine
  modified_base 32: mod_base = OTHER; note = 2'-O-Methyl-adenosine
  modified_base 34: mod_base = OTHER; note = 2'-O-Methyl-adenosine
  modified_base 35: mod_base = OTHER; note = 2'-O-Methyl-adenosine
  modified_base 36: mod_base = OTHER; note = 2'-O-Methyl-adenosine
  modified_base 37: mod_base = OTHER; note = 2'-O-Methyl-uridine
  modified_base 38: mod_base = OTHER; note = 2'-O-Methyl-adenosine
  modified_base 39: mod_base = OTHER; note = 2'-O-Methyl-guanosine
  modified_base 40: mod_base = OTHER; note = 2'-O-Methyl-cytidine
  modified_base 41: mod_base = OTHER; note = 2'-O-Methyl-adenosine
  modified_base 42: mod_base = OTHER; note = 2'-O-Methyl-adenosine
  modified_base 45: mod_base = OTHER; note = uridine phosphorothioate
  modified_base 46: mod_base = OTHER; note = 2'-O-Methyl-adenosine
  modified_base 48: mod_base = OTHER; note = 2'-O-Methyl-adenosine
  modified_base 50: mod_base = OTHER; note = 2'-O-Methyl-uridine
  modified_base 52: mod_base = OTHER; note = 2'-O-Methyl-adenosine
  modified_base 53: mod_base = OTHER; note = 2'-O-Methyl-guanosine
  modified_base 54: mod_base = OTHER; note = 2'-O-Methyl-guanosine
  modified_base 55: mod_base = OTHER; note = 2'-O-Methyl-cytidine
  modified_base 56: mod_base = OTHER; note = 2'-O-Methyl-uridine
  modified_base 57: mod_base = OTHER; note = 2'-O-Methyl-adenosine
  modified_base 60: mod_base = OTHER; note = 2'-O-Methyl-cytidine
  modified_base 61: mod_base = OTHER; note = 2'-O-Methyl-cytidine
  modified_base 64: mod_base = OTHER; note = uridine phosphorothioate
  modified_base 66: mod_base = OTHER; note = 2'-O-Methyl-uridine
  modified_base 67: mod_base = OTHER; note = 2'-O-Methyl-cytidine
  modified_base 70: mod_base = OTHER; note = 2'-O-Methyl-cytidine
  modified_base 71: mod_base = OTHER; note = 2'-O-Methyl-uridine
  modified_base 72: mod_base = OTHER; note = 2'-O-Methyl-uridine
  modified_base 74: mod_base = OTHER; note = 2'-O-Methyl-adenosine
  modified_base 75: mod_base = OTHER; note = 2'-O-Methyl-adenosine
  modified_base 76: mod_base = OTHER; note = 2'-O-Methyl-adenosine
  modified_base 77: mod_base = OTHER; note = 2'-O-Methyl-adenosine
  modified_base 78: mod_base = OTHER; note = 2'-O-Methyl-adenosine
  modified_base 79: mod_base = OTHER; note = 2'-O-Methyl-guanosine
  modified_base 80: mod_base = OTHER; note = 2'-O-Methyl-uridine
  modified_base 81: mod_base = OTHER; note = 2'-O-Methyl-guanosine
  modified_base 83: mod_base = OTHER; note = 2'-O-Methyl-cytidine
  modified_base 84: mod_base = OTHER; note = 2'-O-Methyl-adenosine
  modified_base 85: mod_base = OTHER; note = 2'-O-Methyl-cytidine
  modified_base 86: mod_base = OTHER; note = 2'-O-Methyl-cytidine
  modified_base 87: mod_base = OTHER; note = 2'-O-Methyl-guanosine
  modified_base 88: mod_base = OTHER; note = 2'-O-Methyl-adenosine
  modified_base 89: mod_base = OTHER; note = 2'-O-Methyl-guanosine
  modified_base 90: mod_base = OTHER; note = 2'-O-Methyl-uridine
  modified_base 91: mod_base = OTHER; note = 2'-O-Methyl-cytidine
  modified_base 92: mod_base = OTHER; note = 2'-O-Methyl-guanosine
  modified_base 93: mod_base = OTHER; note = 2'-O-Methyl-guanosine
  modified_base 94: mod_base = OTHER; note = 2'-O-Methyl-uridine
  modified_base 95: mod_base = OTHER; note = 2'-O-Methyl-guanosine
  modified_base 96: mod_base = OTHER; note = 2'-O-Methyl-cytidine
  modified_base 97: mod_base = OTHER; note = 2'-O-Methyl-uridine phosphorothioate
  modified_base 98: mod_base = OTHER; note = 2'-O-Methyl-uridine phosphorothioate
  modified_base 99: mod_base = OTHER; note = 2'-O-Methyl-uridine phosphorothioate
  modified_base 100: mod_base = OTHER; note = 2'-O-Methyl-uridine
  misc_difference 101: note = a, c, g, inosine, u, deoxyadenosine, deoxyguanosine, deoxycytidine, deoxyinosine, thymine, ribonebularine, 2'-O-methylnebularine, or 2'-deoxynebularine
  misc_difference 102: note = a, c, g, inosine, u, deoxyadenosine, deoxyguanosine, deoxycytidine, deoxyinosine, thymine, ribonebularine, 2'-O-methylnebularine, or 2'-deoxynebularine
  misc_difference 103: note = a, c, g, inosine, u, deoxyadenosine, deoxyguanosine, deoxycytidine, deoxyinosine, thymine, ribonebularine, 2'-O-methylnebularine, or 2'-deoxynebularine

SEQ ID NO: 2897 - RNA, 103 nt, synthetic construct; identical to SEQ ID NO: 1797
  source 1..103: mol_type = other RNA
  modified_base 1: mod_base = OTHER; note = 2'-O-Methyl-cytidine phosphorothioate
  modified_base 2: mod_base = OTHER; note = 2'-O-Methyl-adenosine phosphorothioate
  modified_base 3: mod_base = OTHER; note = 2'-O-Methyl-guanosine
  modified_base 21: mod_base = OTHER; note = 2'-O-Methyl-guanosine
  modified_base 28: mod_base = OTHER; note = 2'-O-Methyl-adenosine
  modified_base 29: mod_base = OTHER; note = 2'-O-Methyl-guanosine
  modified_base 30: mod_base = OTHER; note = 2'-O-Methyl-cytidine
  modified_base 31: mod_base = OTHER; note = 2'-O-Methyl-uridine
  modified_base 32: mod_base = OTHER; note = 2'-O-Methyl-adenosine
  modified_base 33: mod_base = OTHER; note = 2'-O-Methyl-guanosine
  modified_base 34: mod_base = OTHER; note = 2'-O-Methyl-adenosine
  modified_base 35: mod_base = OTHER; note = 2'-O-Methyl-adenosine
  modified_base 36: mod_base = OTHER; note = 2'-O-Methyl-adenosine
  modified_base 37: mod_base = OTHER; note = 2'-O-Methyl-uridine
  modified_base 38: mod_base = OTHER; note = 2'-O-Methyl-adenosine
  modified_base 39: mod_base = OTHER; note = 2'-O-Methyl-guanosine
  modified_base 40: mod_base = OTHER; note = 2'-O-Methyl-cytidine
  modified_base 41: mod_base = OTHER; note = 2'-O-Methyl-adenosine
  modified_base 42: mod_base = OTHER; note = 2'-O-Methyl-adenosine
  modified_base 45: mod_base = OTHER; note = uridine phosphorothioate
  modified_base 46: mod_base = OTHER; note = 2'-O-Methyl-adenosine
  modified_base 48: mod_base = OTHER; note = 2'-O-Methyl-adenosine
  modified_base 50: mod_base = OTHER; note = 2'-O-Methyl-uridine
  modified_base 52: mod_base = OTHER; note = 2'-O-Methyl-adenosine
  modified_base 53: mod_base = OTHER; note = 2'-O-Methyl-guanosine
  modified_base 54: mod_base = OTHER; note = 2'-O-Methyl-guanosine
  modified_base 57: mod_base = OTHER; note = 2'-O-Methyl-adenosine
  modified_base 61: mod_base = OTHER; note = 2'-O-Methyl-cytidine
  modified_base 64: mod_base = OTHER; note = uridine phosphorothioate
  modified_base 66: mod_base = OTHER; note = 2'-O-Methyl-uridine
  modified_base 67: mod_base = OTHER; note = 2'-O-Methyl-cytidine
  modified_base 70: mod_base = OTHER; note = 2'-O-Methyl-cytidine
  modified_base 71: mod_base = OTHER; note = 2'-O-Methyl-uridine
  modified_base 72: mod_base = OTHER; note = 2'-O-Methyl-uridine
  modified_base 74: mod_base = OTHER; note = 2'-O-Methyl-adenosine
  modified_base 75: mod_base = OTHER; note = 2'-O-Methyl-adenosine
  modified_base 76: mod_base = OTHER; note = 2'-O-Methyl-adenosine
  modified_base 77: mod_base = OTHER; note = 2'-O-Methyl-adenosine
  modified_base 78: mod_base = OTHER; note = 2'-O-Methyl-adenosine
  modified_base 79: mod_base = OTHER; note = 2'-O-Methyl-guanosine
  modified_base 80: mod_base = OTHER; note = 2'-O-Methyl-uridine
  modified_base 82: mod_base = OTHER; note = 2'-O-Methyl-guanosine
  modified_base 83: mod_base = OTHER; note = 2'-O-Methyl-cytidine
  modified_base 84: mod_base = OTHER; note = 2'-O-Methyl-adenosine
  modified_base 85: mod_base = OTHER; note = 2'-O-Methyl-cytidine
  modified_base 86: mod_base = OTHER; note = 2'-O-Methyl-cytidine
  modified_base 87: mod_base = OTHER; note = 2'-O-Methyl-guanosine
  modified_base 89: mod_base = OTHER; note = 2'-O-Methyl-guanosine
  modified_base 92: mod_base = OTHER; note = 2'-O-Methyl-guanosine
  modified_base 93: mod_base = OTHER; note = 2'-O-Methyl-guanosine
  modified_base 94: mod_base = OTHER; note = 2'-O-Methyl-uridine
  modified_base 95: mod_base = OTHER; note = 2'-O-Methyl-guanosine
  modified_base 96: mod_base = OTHER; note = 2'-O-Methyl-cytidine
  modified_base 97: mod_base = OTHER; note = 2'-O-Methyl-uridine phosphorothioate
  modified_base 98: mod_base = OTHER; note = 2'-O-Methyl-uridine phosphorothioate
  modified_base 99: mod_base = OTHER; note = 2'-O-Methyl-uridine phosphorothioate
  modified_base 100: mod_base = OTHER; note = 2'-O-Methyl-uridine
  misc_difference 101: note = a, c, g, inosine, u, deoxyadenosine, deoxyguanosine, deoxycytidine, deoxyinosine, thymine, ribonebularine, 2'-O-methylnebularine, or 2'-deoxynebularine
  misc_difference 102: note = a, c, g, inosine, u, deoxyadenosine, deoxyguanosine, deoxycytidine, deoxyinosine, thymine, ribonebularine, 2'-O-methylnebularine, or 2'-deoxynebularine
  misc_difference 103: note = a, c, g, inosine, u, deoxyadenosine, deoxyguanosine, deoxycytidine, deoxyinosine, thymine, ribonebularine, 2'-O-methylnebularine, or 2'-deoxynebularine

SEQ ID NO: 2898 - RNA, 103 nt, synthetic construct; identical to SEQ ID NO: 1797
  source 1..103: mol_type = other RNA
  modified_base 1: mod_base = OTHER; note = 2'-O-Methyl-cytidine phosphorothioate
  modified_base 2: mod_base = OTHER; note = 2'-O-Methyl-adenosine phosphorothioate
  modified_base 3: mod_base = OTHER; note = 2'-O-Methyl-guanosine
  modified_base 21: mod_base = OTHER; note = 2'-O-Methyl-guanosine
  modified_base 28: mod_base = OTHER; note = 2'-O-Methyl-adenosine
  modified_base 29: mod_base = OTHER; note = 2'-O-Methyl-guanosine
  modified_base 30: mod_base = OTHER; note = 2'-O-Methyl-cytidine
  modified_base 31: mod_base = OTHER; note = 2'-O-Methyl-uridine
  modified_base 32: mod_base = OTHER; note = 2'-O-Methyl-adenosine
  modified_base 33: mod_base = OTHER; note = 2'-O-Methyl-guanosine
  modified_base 34: mod_base = OTHER; note = 2'-O-Methyl-adenosine
  modified_base 35: mod_base = OTHER; note = 2'-O-Methyl-adenosine
  modified_base 36: mod_base = OTHER; note = 2'-O-Methyl-adenosine
  modified_base 37: mod_base = OTHER; note = 2'-O-Methyl-uridine
  modified_base 38: mod_base = OTHER; note = 2'-O-Methyl-adenosine
  modified_base 39: mod_base = OTHER; note = 2'-O-Methyl-guanosine
  modified_base 40: mod_base = OTHER; note = 2'-O-Methyl-cytidine
  modified_base 41: mod_base = OTHER; note = 2'-O-Methyl-adenosine
  modified_base 42: mod_base = OTHER; note = 2'-O-Methyl-adenosine
  modified_base 45: mod_base = OTHER; note = uridine phosphorothioate
  modified_base 46: mod_base = OTHER; note = 2'-O-Methyl-adenosine
  modified_base 48: mod_base = OTHER; note = 2'-O-Methyl-adenosine
  modified_base 50: mod_base = OTHER; note = 2'-O-Methyl-uridine
  modified_base 52: mod_base = OTHER; note = 2'-O-Methyl-adenosine
  modified_base 53: mod_base = OTHER; note = 2'-O-Methyl-guanosine
  modified_base 54: mod_base = OTHER; note = 2'-O-Methyl-guanosine
  modified_base 55: mod_base = OTHER; note = 2'-O-Methyl-cytidine
  modified_base 56: mod_base = OTHER; note = 2'-O-Methyl-uridine
  modified_base 57: mod_base = OTHER; note = 2'-O-Methyl-adenosine
  modified_base 60: mod_base = OTHER; note = 2'-O-Methyl-cytidine
  modified_base 61: mod_base = OTHER; note = 2'-O-Methyl-cytidine
  modified_base 64: mod_base = OTHER; note = uridine phosphorothioate
  modified_base 66: mod_base = OTHER; note = 2'-O-Methyl-uridine
  modified_base 67: mod_base = OTHER; note = 2'-O-Methyl-cytidine
  modified_base 70: mod_base = OTHER; note = 2'-O-Methyl-cytidine
  modified_base 71: mod_base = OTHER; note = 2'-O-Methyl-uridine
  modified_base 72: mod_base = OTHER; note = 2'-O-Methyl-uridine
  modified_base 74: mod_base = OTHER; note = 2'-O-Methyl-adenosine
  modified_base 75: mod_base = OTHER; note = 2'-O-Methyl-adenosine
  modified_base 76: mod_base = OTHER; note = 2'-O-Methyl-adenosine
  modified_base 77: mod_base = OTHER; note = 2'-O-Methyl-adenosine
  modified_base 78: mod_base = OTHER; note = 2'-O-Methyl-adenosine
  modified_base 79: mod_base = OTHER; note = 2'-O-Methyl-guanosine
  modified_base 80: mod_base = OTHER; note = 2'-O-Methyl-uridine
  modified_base 82: mod_base = OTHER; note = 2'-O-Methyl-guanosine
  modified_base 83: mod_base = OTHER; note = 2'-O-Methyl-cytidine
  modified_base 84: mod_base = OTHER; note = 2'-O-Methyl-adenosine
  modified_base 85: mod_base = OTHER; note = 2'-O-Methyl-cytidine
  modified_base 86: mod_base = OTHER; note = 2'-O-Methyl-cytidine
  modified_base 87: mod_base = OTHER; note = 2'-O-Methyl-guanosine
  modified_base 89: mod_base = OTHER; note = 2'-O-Methyl-guanosine
  modified_base 92: mod_base = OTHER; note = 2'-O-Methyl-guanosine
  modified_base 93: mod_base = OTHER; note = 2'-O-Methyl-guanosine
  modified_base 94: mod_base = OTHER; note = 2'-O-Methyl-uridine
  modified_base 95: mod_base = OTHER; note = 2'-O-Methyl-guanosine
  modified_base 96: mod_base = OTHER; note = 2'-O-Methyl-cytidine
  modified_base 97: mod_base = OTHER; note = 2'-O-Methyl-uridine phosphorothioate
  modified_base 98: mod_base = OTHER; note = 2'-O-Methyl-uridine phosphorothioate
  modified_base 99: mod_base = OTHER; note = 2'-O-Methyl-uridine phosphorothioate
  modified_base 100: mod_base = OTHER; note = 2'-O-Methyl-uridine
  misc_difference 101: note = a, c, g, inosine, u, deoxyadenosine, deoxyguanosine, deoxycytidine, deoxyinosine, thymine, ribonebularine, 2'-O-methylnebularine, or 2'-deoxynebularine
  misc_difference 102: note = a, c, g, inosine, u, deoxyadenosine, deoxyguanosine, deoxycytidine, deoxyinosine, thymine, ribonebularine, 2'-O-methylnebularine, or 2'-deoxynebularine
  misc_difference 103: note = a, c, g, inosine, u, deoxyadenosine, deoxyguanosine, deoxycytidine, deoxyinosine, thymine, ribonebularine, 2'-O-methylnebularine, or 2'-deoxynebularine

SEQ ID NO: 2899 - RNA, 103 nt, synthetic construct; identical to SEQ ID NO: 1797
  source 1..103: mol_type = other RNA
  modified_base 1: mod_base = OTHER; note = 2'-O-Methyl-cytidine phosphorothioate
  modified_base 2: mod_base = OTHER; note = 2'-O-Methyl-adenosine phosphorothioate
  modified_base 3: mod_base = OTHER; note = 2'-O-Methyl-guanosine
  modified_base 21: mod_base = OTHER; note = 2'-O-Methyl-guanosine
  modified_base 28: mod_base = OTHER; note = 2'-O-Methyl-adenosine
  modified_base 29: mod_base = OTHER; note = 2'-O-Methyl-guanosine
  modified_base 30: mod_base = OTHER; note = 2'-O-Methyl-cytidine
  modified_base 31: mod_base = OTHER; note = 2'-O-Methyl-uridine
  modified_base 32: mod_base = OTHER; note = 2'-O-Methyl-adenosine
  modified_base 33: mod_base = OTHER; note = 2'-O-Methyl-guanosine
  modified_base 34: mod_base = OTHER; note = 2'-O-Methyl-adenosine
  modified_base 35: mod_base = OTHER; note = 2'-O-Methyl-adenosine
  modified_base 36: mod_base = OTHER; note = 2'-O-Methyl-adenosine
  modified_base 37: mod_base = OTHER; note = 2'-O-Methyl-uridine
  modified_base 38: mod_base = OTHER; note = 2'-O-Methyl-adenosine
  modified_base 39: mod_base = OTHER; note = 2'-O-Methyl-guanosine
  modified_base 40: mod_base = OTHER; note = 2'-O-Methyl-cytidine
  modified_base 41: mod_base = OTHER; note = 2'-O-Methyl-adenosine
  modified_base 42: mod_base = OTHER; note = 2'-O-Methyl-adenosine
  modified_base 45: mod_base = OTHER; note = uridine phosphorothioate
  modified_base 46: mod_base = OTHER; note = 2'-O-Methyl-adenosine
  modified_base 48: mod_base = OTHER; note = 2'-O-Methyl-adenosine
  modified_base 50: mod_base = OTHER; note = 2'-O-Methyl-uridine
  modified_base 52: mod_base = OTHER; note = 2'-O-Methyl-adenosine
  modified_base 53: mod_base = OTHER; note = 2'-O-Methyl-guanosine
  modified_base 54: mod_base = OTHER; note = 2'-O-Methyl-guanosine
  modified_base 57: mod_base = OTHER; note = 2'-O-Methyl-adenosine
  modified_base 61: mod_base = OTHER; note = 2'-O-Methyl-cytidine
  modified_base 64: mod_base = OTHER; note = uridine phosphorothioate
  modified_base 66: mod_base = OTHER; note = 2'-O-Methyl-uridine
  modified_base 67: mod_base = OTHER; note = 2'-O-Methyl-cytidine
  modified_base 70: mod_base = OTHER; note = 2'-O-Methyl-cytidine
  modified_base 71: mod_base = OTHER; note = 2'-O-Methyl-uridine
  modified_base 72: mod_base = OTHER; note = 2'-O-Methyl-uridine
  modified_base 73: mod_base = OTHER; note = 2'-O-Methyl-guanosine
  modified_base 74: mod_base = OTHER; note = 2'-O-Methyl-adenosine
  modified_base 75: mod_base = OTHER; note = 2'-O-Methyl-adenosine
  modified_base 76: mod_base = OTHER; note = 2'-O-Methyl-adenosine
  modified_base 77: mod_base = OTHER; note = 2'-O-Methyl-adenosine
  modified_base 78: mod_base = OTHER; note = 2'-O-Methyl-adenosine
  modified_base 79: mod_base = OTHER; note = 2'-O-Methyl-guanosine
  modified_base 80: mod_base = OTHER; note = 2'-O-Methyl-uridine
  modified_base 82: mod_base = OTHER; note = 2'-O-Methyl-guanosine
  modified_base 83: mod_base = OTHER; note = 2'-O-Methyl-cytidine
  modified_base 84: mod_base = OTHER; note = 2'-O-Methyl-adenosine
  modified_base 85: mod_base = OTHER; note = 2'-O-Methyl-cytidine
  modified_base 86: mod_base = OTHER; note = 2'-O-Methyl-cytidine
  modified_base 87: mod_base = OTHER; note = 2'-O-Methyl-guanosine
  modified_base 89: mod_base = OTHER; note = 2'-O-Methyl-guanosine
  modified_base 92: mod_base = OTHER; note = 2'-O-Methyl-guanosine
  modified_base 93: mod_base = OTHER; note = 2'-O-Methyl-guanosine
  modified_base 94: mod_base = OTHER; note = 2'-O-Methyl-uridine
  modified_base 95: mod_base = OTHER; note = 2'-O-Methyl-guanosine
  modified_base 96: mod_base = OTHER; note = 2'-O-Methyl-cytidine
  modified_base 97: mod_base = OTHER; note = 2'-O-Methyl-uridine phosphorothioate
  modified_base 98: mod_base = OTHER; note = 2'-O-Methyl-uridine phosphorothioate
  modified_base 99: mod_base = OTHER; note = 2'-O-Methyl-uridine phosphorothioate
  modified_base 100: mod_base = OTHER; note = 2'-O-Methyl-uridine
  misc_difference 101: note = a, c, g, inosine, u, deoxyadenosine, deoxyguanosine, deoxycytidine, deoxyinosine, thymine, ribonebularine, 2'-O-methylnebularine, or 2'-deoxynebularine
  misc_difference 102: note = a, c, g, inosine, u, deoxyadenosine, deoxyguanosine, deoxycytidine, deoxyinosine, thymine, ribonebularine, 2'-O-methylnebularine, or 2'-deoxynebularine
  misc_difference 103: note = a, c, g, inosine, u, deoxyadenosine, deoxyguanosine, deoxycytidine, deoxyinosine, thymine, ribonebularine, 2'-O-methylnebularine, or 2'-deoxynebularine

SEQ ID NO: 2900 - RNA, 103 nt, synthetic construct; identical to SEQ ID NO: 1797
  source 1..103: mol_type = other RNA
  modified_base 1: mod_base = OTHER; note = 2'-O-Methyl-cytidine phosphorothioate
  modified_base 2: mod_base = OTHER; note = 2'-O-Methyl-adenosine phosphorothioate
  modified_base 3: mod_base = OTHER; note = 2'-O-Methyl-guanosine
  modified_base 21: mod_base = OTHER; note = 2'-O-Methyl-guanosine
  modified_base 28: mod_base = OTHER; note = 2'-O-Methyl-adenosine
  modified_base 29: mod_base = OTHER; note = 2'-O-Methyl-guanosine
  modified_base 30: mod_base = OTHER; note = 2'-O-Methyl-cytidine
  modified_base 31: mod_base = OTHER; note = 2'-O-Methyl-uridine
  modified_base 32: mod_base = OTHER; note = 2'-O-Methyl-adenosine
  modified_base 33: mod_base = OTHER; note = 2'-O-Methyl-guanosine
  modified_base 34: mod_base = OTHER; note = 2'-O-Methyl-adenosine
  modified_base 35: mod_base = OTHER; note = 2'-O-Methyl-adenosine
  modified_base 36: mod_base = OTHER; note = 2'-O-Methyl-adenosine
  modified_base 37: mod_base = OTHER; note = 2'-O-Methyl-uridine
  modified_base 38: mod_base = OTHER; note = 2'-O-Methyl-adenosine
  modified_base 39: mod_base = OTHER; note = 2'-O-Methyl-guanosine
  modified_base 40: mod_base = OTHER; note = 2'-O-Methyl-cytidine
  modified_base 41: mod_base = OTHER; note = 2'-O-Methyl-adenosine
  modified_base 42: mod_base = OTHER; note = 2'-O-Methyl-adenosine
  modified_base 45: mod_base = OTHER; note = uridine phosphorothioate
  modified_base 46: mod_base = OTHER; note = 2'-O-Methyl-adenosine
  modified_base 48: mod_base = OTHER; note = 2'-O-Methyl-adenosine
  modified_base 50: mod_base = OTHER; note = 2'-O-Methyl-uridine
  modified_base 52: mod_base = OTHER; note = 2'-O-Methyl-adenosine
  modified_base 53: mod_base = OTHER; note = 2'-O-Methyl-guanosine
  modified_base 54: mod_base = OTHER; note = 2'-O-Methyl-guanosine
  modified_base 57: mod_base = OTHER; note = 2'-O-Methyl-adenosine
  modified_base 61: mod_base = OTHER; note = 2'-O-Methyl-cytidine
  modified_base 64: mod_base = OTHER; note = uridine phosphorothioate
  modified_base 66: mod_base = OTHER; note = 2'-O-Methyl-uridine
  modified_base 67: mod_base = OTHER; note = 2'-O-Methyl-cytidine
  modified_base 70: mod_base = OTHER; note = 2'-O-Methyl-cytidine
  modified_base 71: mod_base = OTHER; note = 2'-O-Methyl-uridine
  modified_base 72: mod_base = OTHER; note = 2'-O-Methyl-uridine
  modified_base 73: mod_base = OTHER; note = 2'-O-Methyl-guanosine
  modified_base 74: mod_base = OTHER; note = 2'-O-Methyl-adenosine
  modified_base 75: mod_base = OTHER; note = 2'-O-Methyl-adenosine
  modified_base 76: mod_base = OTHER; note = 2'-O-Methyl-adenosine
  modified_base 77: mod_base = OTHER; note = 2'-O-Methyl-adenosine
  modified_base 78: mod_base = OTHER; note = 2'-O-Methyl-adenosine
  modified_base 79: mod_base = OTHER; note = 2'-O-Methyl-guanosine
  modified_base 80: mod_base = OTHER; note = 2'-O-Methyl-uridine
  modified_base 82: mod_base = OTHER; note = 2'-O-Methyl-guanosine
  modified_base 83: mod_base = OTHER; note = 2'-O-Methyl-cytidine
  modified_base 84: mod_base = OTHER; note = 2'-O-Methyl-adenosine
  modified_base 85: mod_base = OTHER; note = 2'-O-Methyl-cytidine
  modified_base 86: mod_base = OTHER; note = 2'-O-Methyl-cytidine
  modified_base 87: mod_base = OTHER; note = 2'-O-Methyl-guanosine
  modified_base 89: mod_base = OTHER; note = 2'-O-Methyl-guanosine
  modified_base 91: mod_base = OTHER; note = 2'-O-Methyl-cytidine
  modified_base 92: mod_base = OTHER; note = 2'-O-Methyl-guanosine
  modified_base 93: mod_base = OTHER; note = 2'-O-Methyl-guanosine
  modified_base 94: mod_base = OTHER; note = 2'-O-Methyl-uridine
  modified_base 95: mod_base = OTHER; note = 2'-O-Methyl-guanosine
  modified_base 96: mod_base = OTHER; note = 2'-O-Methyl-cytidine
  modified_base 97: mod_base = OTHER; note = 2'-O-Methyl-uridine phosphorothioate
  modified_base 98: mod_base = OTHER; note = 2'-O-Methyl-uridine phosphorothioate
  modified_base 99: mod_base = OTHER; note = 2'-O-Methyl-uridine phosphorothioate
  modified_base 100: mod_base = OTHER; note = 2'-O-Methyl-uridine
  misc_difference 101: note = a, c, g, inosine, u, deoxyadenosine, deoxyguanosine, deoxycytidine, deoxyinosine, thymine, ribonebularine, 2'-O-methylnebularine, or 2'-deoxynebularine
  misc_difference 102: note = a, c, g, inosine, u, deoxyadenosine, deoxyguanosine, deoxycytidine, deoxyinosine, thymine, ribonebularine, 2'-O-methylnebularine, or 2'-deoxynebularine
  misc_difference 103: note = a, c, g, inosine, u, deoxyadenosine, deoxyguanosine, deoxycytidine, deoxyinosine, thymine, ribonebularine, 2'-O-methylnebularine, or 2'-deoxynebularine

SEQ ID NO: 2901 - RNA, 103 nt, synthetic construct; identical to SEQ ID NO: 1797
  source 1..103: mol_type = other RNA
  modified_base 1: mod_base = OTHER; note = 2'-O-Methyl-cytidine phosphorothioate
  modified_base 2: mod_base = OTHER; note = 2'-O-Methyl-adenosine phosphorothioate
  modified_base 3: mod_base = OTHER; note = 2'-O-Methyl-guanosine
  modified_base 21: mod_base = OTHER; note = 2'-O-Methyl-guanosine
  modified_base 28: mod_base = OTHER; note = 2'-O-Methyl-adenosine
  modified_base 29: mod_base = OTHER; note = 2'-O-Methyl-guanosine
  modified_base 30: mod_base = OTHER; note = 2'-O-Methyl-cytidine
  modified_base 31: mod_base = OTHER; note = 2'-O-Methyl-uridine
  modified_base 32: mod_base = OTHER; note = 2'-O-Methyl-adenosine
  modified_base 34: mod_base = OTHER; note = 2'-O-Methyl-adenosine
  modified_base 35: mod_base = OTHER; note = 2'-O-Methyl-adenosine
  modified_base 36: mod_base = OTHER; note = 2'-O-Methyl-adenosine
  modified_base 37: mod_base = OTHER; note = 2'-O-Methyl-uridine
  modified_base 38: mod_base = OTHER; note = 2'-O-Methyl-adenosine
  modified_base 39: mod_base = OTHER; note = 2'-O-Methyl-guanosine
  modified_base 40: mod_base = OTHER; note = 2'-O-Methyl-cytidine
  modified_base 41: mod_base = OTHER; note = 2'-O-Methyl-adenosine
  modified_base 42: mod_base = OTHER; note = 2'-O-Methyl-adenosine
  modified_base 45: mod_base = OTHER; note = uridine phosphorothioate
  modified_base 46: mod_base = OTHER; note = 2'-O-Methyl-adenosine
  modified_base 48: mod_base = OTHER; note = 2'-O-Methyl-adenosine
  modified_base 50: mod_base = OTHER; note = 2'-O-Methyl-uridine
  modified_base 52: mod_base = OTHER; note = 2'-O-Methyl-adenosine
  modified_base 53: mod_base = OTHER; note = 2'-O-Methyl-guanosine
  modified_base 54: mod_base = OTHER; note = 2'-O-Methyl-guanosine
  modified_base 57: mod_base = OTHER; note = 2'-O-Methyl-adenosine
  modified_base 61: mod_base = OTHER; note = 2'-O-Methyl-cytidine
  modified_base 64: mod_base = OTHER; note = uridine phosphorothioate
  modified_base 66: mod_base = OTHER; note = 2'-O-Methyl-uridine
  modified_base 67: mod_base = OTHER; note = 2'-O-Methyl-cytidine
  modified_base 70: mod_base = OTHER; note = 2'-O-Methyl-cytidine
  modified_base 71: mod_base = OTHER; note = 2'-O-Methyl-uridine
  modified_base 72: mod_base = OTHER; note = 2'-O-Methyl-uridine
  modified_base 73: mod_base = OTHER; note = 2'-O-Methyl-guanosine
  modified_base 74: mod_base = OTHER; note = 2'-O-Methyl-adenosine
  modified_base 75: mod_base = OTHER; note = 2'-O-Methyl-adenosine
  modified_base 76: mod_base = OTHER; note = 2'-O-Methyl-adenosine
  modified_base 77: mod_base = OTHER; note = 2'-O-Methyl-adenosine
  modified_base 78: mod_base = OTHER; note = 2'-O-Methyl-adenosine
  modified_base 79: mod_base = OTHER; note = 2'-O-Methyl-guanosine
  modified_base 80: mod_base = OTHER; note = 2'-O-Methyl-uridine
  modified_base 82: mod_base = OTHER; note = 2'-O-Methyl-guanosine
  modified_base 83: mod_base = OTHER; note = 2'-O-Methyl-cytidine
  modified_base 84: mod_base = OTHER; note = 2'-O-Methyl-adenosine
  modified_base 85: mod_base = OTHER; note = 2'-O-Methyl-cytidine
  modified_base 86: mod_base = OTHER; note = 2'-O-Methyl-cytidine
  modified_base 87: mod_base = OTHER; note = 2'-O-Methyl-guanosine
  modified_base 89: mod_base = OTHER; note = 2'-O-Methyl-guanosine
  modified_base 92: mod_base = OTHER; note = 2'-O-Methyl-guanosine
  modified_base 93: mod_base = OTHER; note = 2'-O-Methyl-guanosine
  modified_base 94: mod_base = OTHER; note = 2'-O-Methyl-uridine
  modified_base 95: mod_base = OTHER; note = 2'-O-Methyl-guanosine
  modified_base 96: mod_base = OTHER; note = 2'-O-Methyl-cytidine
  modified_base 97: mod_base = OTHER; note = 2'-O-Methyl-uridine phosphorothioate
  modified_base 98: mod_base = OTHER; note = 2'-O-Methyl-uridine phosphorothioate
  modified_base 99: mod_base = OTHER; note = 2'-O-Methyl-uridine phosphorothioate
  modified_base 100: mod_base = OTHER; note = 2'-O-Methyl-uridine
  misc_difference 101: note = a, c, g, inosine, u, deoxyadenosine, deoxyguanosine, deoxycytidine, deoxyinosine, thymine, ribonebularine, 2'-O-methylnebularine, or 2'-deoxynebularine
  misc_difference 102: note = a, c, g, inosine, u, deoxyadenosine, deoxyguanosine, deoxycytidine, deoxyinosine, thymine, ribonebularine, 2'-O-methylnebularine, or 2'-deoxynebularine
  misc_difference 103: note = a, c, g, inosine, u, deoxyadenosine, deoxyguanosine, deoxycytidine, deoxyinosine, thymine, ribonebularine, 2'-O-methylnebularine, or 2'-deoxynebularine

SEQ ID NO: 2902 - RNA, 103 nt, synthetic construct; identical to SEQ ID NO: 1797
  source 1..103: mol_type = other RNA
  modified_base 1: mod_base = OTHER; note = 2'-O-Methyl-cytidine phosphorothioate
  modified_base 2: mod_base = OTHER; note = 2'-O-Methyl-adenosine phosphorothioate
  modified_base 3: mod_base = OTHER; note = 2'-O-Methyl-guanosine
  modified_base 21: mod_base = OTHER; note = 2'-O-Methyl-guanosine
  modified_base 28: mod_base = OTHER; note = 2'-O-Methyl-adenosine
  modified_base 29: mod_base = OTHER; note = 2'-O-Methyl-guanosine
  modified_base 30: mod_base = OTHER; note = 2'-O-Methyl-cytidine
  modified_base 31: mod_base = OTHER; note = 2'-O-Methyl-uridine
  modified_base 32: mod_base = OTHER; note = 2'-O-Methyl-adenosine
  modified_base 34: mod_base = OTHER; note = 2'-O-Methyl-adenosine
  modified_base 35: mod_base = OTHER; note = 2'-O-Methyl-adenosine
  modified_base 36: mod_base = OTHER; note = 2'-O-Methyl-adenosine
  modified_base 37: mod_base = OTHER; note = 2'-O-Methyl-uridine
  modified_base 38: mod_base = OTHER; note = 2'-O-Methyl-adenosine
  modified_base 39: mod_base = OTHER; note = 2'-O-Methyl-guanosine
  modified_base 40: mod_base = OTHER; note = 2'-O-Methyl-cytidine
  modified_base 41: mod_base = OTHER; note = 2'-O-Methyl-adenosine
  modified_base 42: mod_base = OTHER; note = 2'-O-Methyl-adenosine
  modified_base 45: mod_base = OTHER; note = uridine phosphorothioate
  modified_base 46: mod_base = OTHER; note = 2'-O-Methyl-adenosine
  modified_base 48: mod_base = OTHER; note = 2'-O-Methyl-adenosine
  modified_base 50: mod_base = OTHER; note = 2'-O-Methyl-uridine
  modified_base 52: mod_base = OTHER; note = 2'-O-Methyl-adenosine
  modified_base 53: mod_base = OTHER; note = 2'-O-Methyl-guanosine
  modified_base 54: mod_base = OTHER; note = 2'-O-Methyl-guanosine
  modified_base 57: mod_base = OTHER; note = 2'-O-Methyl-adenosine
  modified_base 61: mod_base = OTHER; note = 2'-O-Methyl-cytidine
  modified_base 64: mod_base = OTHER; note = uridine phosphorothioate
  modified_base 66: mod_base = OTHER; note = 2'-O-Methyl-uridine
  modified_base 67: mod_base = OTHER; note = 2'-O-Methyl-cytidine
  modified_base 70: mod_base = OTHER; note = 2'-O-Methyl-cytidine
  modified_base 71: mod_base = OTHER; note = 2'-O-Methyl-uridine
  modified_base 72: mod_base = OTHER; note = 2'-O-Methyl-uridine
  modified_base 73: mod_base = OTHER; note = 2'-O-Methyl-guanosine
  modified_base 74: mod_base = OTHER; note = 2'-O-Methyl-adenosine
  modified_base 75: mod_base = OTHER; note = 2'-O-Methyl-adenosine
  modified_base 76: mod_base = OTHER; note = 2'-O-Methyl-adenosine
  modified_base 77: mod_base = OTHER; note = 2'-O-Methyl-adenosine
  modified_base 78: mod_base = OTHER; note = 2'-O-Methyl-adenosine
  modified_base 79: mod_base = OTHER; note = 2'-O-Methyl-guanosine
  modified_base 80: mod_base = OTHER; note = 2'-O-Methyl-uridine
  modified_base 82: mod_base = OTHER; note = 2'-O-Methyl-guanosine
  modified_base 83: mod_base = OTHER; note = 2'-O-Methyl-cytidine
  modified_base 84: mod_base = OTHER; note = 2'-O-Methyl-adenosine
  modified_base 85: mod_base = OTHER; note = 2'-O-Methyl-cytidine
  modified_base 86: mod_base = OTHER; note = 2'-O-Methyl-cytidine
  modified_base 87: mod_base = OTHER; note = 2'-O-Methyl-guanosine
  modified_base 89: mod_base = OTHER; note = 2'-O-Methyl-guanosine
  modified_base 91: mod_base = OTHER; note = 2'-O-Methyl-cytidine
  modified_base 92: mod_base = OTHER; note = 2'-O-Methyl-guanosine
  modified_base 93: mod_base = OTHER; note = 2'-O-Methyl-guanosine
  modified_base 94: mod_base = OTHER; note = 2'-O-Methyl-uridine
  modified_base 95: mod_base = OTHER; note = 2'-O-Methyl-guanosine
  modified_base 96: mod_base = OTHER; note = 2'-O-Methyl-cytidine
  modified_base 97: mod_base = OTHER; note = 2'-O-Methyl-uridine phosphorothioate
  modified_base 98: mod_base = OTHER; note = 2'-O-Methyl-uridine phosphorothioate
  modified_base 99: mod_base = OTHER; note = 2'-O-Methyl-uridine phosphorothioate
  modified_base 100: mod_base = OTHER; note = 2'-O-Methyl-uridine
  misc_difference 101: note = a, c, g, inosine, u, deoxyadenosine, deoxyguanosine, deoxycytidine, deoxyinosine, thymine, ribonebularine, 2'-O-methylnebularine, or 2'-deoxynebularine
  misc_difference 102: note = a, c, g, inosine, u, deoxyadenosine, deoxyguanosine, deoxycytidine, deoxyinosine, thymine, ribonebularine, 2'-O-methylnebularine, or 2'-deoxynebularine
  misc_difference 103: note = a, c, g, inosine, u, deoxyadenosine, deoxyguanosine, deoxycytidine, deoxyinosine, thymine, ribonebularine, 2'-O-methylnebularine, or 2'-deoxynebularine

SEQ ID NO: 2903 - RNA, 103 nt, synthetic construct; identical to SEQ ID NO: 1797
  source 1..103: mol_type = other RNA
  modified_base 1: mod_base = OTHER; note = 2'-O-Methyl-cytidine phosphorothioate
  modified_base 2: mod_base = OTHER; note = 2'-O-Methyl-adenosine phosphorothioate
  modified_base 3: mod_base = OTHER; note = 2'-O-Methyl-guanosine
  modified_base 21: mod_base = OTHER; note = 2'-O-Methyl-guanosine
  modified_base 28: mod_base = OTHER; note = 2'-O-Methyl-adenosine
  modified_base 29: mod_base = OTHER; note = 2'-O-Methyl-guanosine
  modified_base 30: mod_base = OTHER; note = 2'-O-Methyl-cytidine
  modified_base 31: mod_base = OTHER; note = 2'-O-Methyl-uridine
  modified_base 32: mod_base = OTHER; note = 2'-O-Methyl-adenosine
  modified_base 34: mod_base = OTHER; note = 2'-O-Methyl-adenosine
  modified_base 35: mod_base = OTHER; note = 2'-O-Methyl-adenosine
  modified_base 36: mod_base = OTHER; note = 2'-O-Methyl-adenosine
  modified_base 37: mod_base = OTHER; note = 2'-O-Methyl-uridine
  modified_base 38: mod_base = OTHER; note = 2'-O-Methyl-adenosine
  modified_base 39: mod_base = OTHER; note = 2'-O-Methyl-guanosine
  modified_base 40: mod_base = OTHER; note = 2'-O-Methyl-cytidine
  modified_base 41: mod_base = OTHER; note = 2'-O-Methyl-adenosine
  modified_base 42: mod_base = OTHER; note = 2'-O-Methyl-adenosine
  modified_base 45: mod_base = OTHER; note = uridine phosphorothioate
  modified_base 46: mod_base = OTHER; note = 2'-O-Methyl-adenosine
  modified_base 48: mod_base = OTHER; note = 2'-O-Methyl-adenosine
  modified_base 50: mod_base = OTHER; note = 2'-O-Methyl-uridine
  modified_base 52: mod_base = OTHER; note = 2'-O-Methyl-adenosine
  modified_base 53: mod_base = OTHER; note = 2'-O-Methyl-guanosine
  modified_base 54: mod_base = OTHER; note = 2'-O-Methyl-guanosine
  modified_base 55: mod_base = OTHER; note = 2'-O-Methyl-cytidine
  modified_base 56: mod_base = OTHER; note = 2'-O-Methyl-uridine
  modified_base 57: mod_base = OTHER; note = 2'-O-Methyl-adenosine
  modified_base 60: mod_base = OTHER; note = 2'-O-Methyl-cytidine
  modified_base 61: mod_base = OTHER; note = 2'-O-Methyl-cytidine
  modified_base 64: mod_base = OTHER; note = uridine phosphorothioate
  modified_base 66: mod_base = OTHER; note = 2'-O-Methyl-uridine
  modified_base 67: mod_base = OTHER; note = 2'-O-Methyl-cytidine
  modified_base 70: mod_base = OTHER; note = 2'-O-Methyl-cytidine
  modified_base 71: mod_base = OTHER; note = 2'-O-Methyl-uridine
  modified_base 72: mod_base = OTHER; note = 2'-O-Methyl-uridine
  modified_base 74: mod_base = OTHER; note = 2'-O-Methyl-adenosine
  modified_base 75: mod_base = OTHER; note = 2'-O-Methyl-adenosine
  modified_base 76: mod_base = OTHER; note = 2'-O-Methyl-adenosine
  modified_base 77: mod_base = OTHER; note = 2'-O-Methyl-adenosine
  modified_base 78: mod_base = OTHER; note = 2'-O-Methyl-adenosine
  modified_base 79: mod_base = OTHER; note = 2'-O-Methyl-guanosine
  modified_base 80: mod_base = OTHER; note = 2'-O-Methyl-uridine
  modified_base 82: mod_base = OTHER; note = 2'-O-Methyl-guanosine
  modified_base 83: mod_base = OTHER; note = 2'-O-Methyl-cytidine
  modified_base 84: mod_base = OTHER; note = 2'-O-Methyl-adenosine
  modified_base 85: mod_base = OTHER; note = 2'-O-Methyl-cytidine
  modified_base 86: mod_base = OTHER; note = 2'-O-Methyl-cytidine
  modified_base 87: mod_base = OTHER; note = 2'-O-Methyl-guanosine
  modified_base 89: mod_base = OTHER; note = 2'-O-Methyl-guanosine
  modified_base 92: mod_base = OTHER; note = 2'-O-Methyl-guanosine
  modified_base 93: mod_base = OTHER; note = 2'-O-Methyl-guanosine
  modified_base 94: mod_base = OTHER; note = 2'-O-Methyl-uridine
  modified_base 95: mod_base = OTHER; note = 2'-O-Methyl-guanosine
  modified_base 96: mod_base = OTHER; note = 2'-O-Methyl-cytidine
  modified_base 97: mod_base = OTHER; note = 2'-O-Methyl-uridine phosphorothioate
  modified_base 98: mod_base = OTHER; note = 2'-O-Methyl-uridine phosphorothioate
  modified_base 99: mod_base = OTHER; note = 2'-O-Methyl-uridine phosphorothioate
  modified_base 100: mod_base = OTHER; note = 2'-O-Methyl-uridine
  misc_difference 101: note = a, c, g, inosine, u, deoxyadenosine, deoxyguanosine, deoxycytidine, deoxyinosine, thymine, ribonebularine, 2'-O-methylnebularine, or 2'-deoxynebularine
  misc_difference 102: note = a, c, g, inosine, u, deoxyadenosine, deoxyguanosine, deoxycytidine, deoxyinosine, thymine, ribonebularine, 2'-O-methylnebularine, or 2'-deoxynebularine
  misc_difference 103: note = a, c, g, inosine, u, deoxyadenosine, deoxyguanosine, deoxycytidine, deoxyinosine, thymine, ribonebularine, 2'-O-methylnebularine, or 2'-deoxynebularine

SEQ ID NO: 2904 - RNA, 103 nt, synthetic construct; identical to SEQ ID NO: 1795
  source 1..103: mol_type = other RNA
  modified_base 1: mod_base = OTHER; note = 2'-O-Methyl-cytidine phosphorothioate
  modified_base 2: mod_base = OTHER; note = 2'-O-Methyl-cytidine phosphorothioate
  modified_base 3: mod_base = OTHER; note = 2'-O-Methyl-cytidine
  modified_base 21: mod_base = OTHER; note = 2'-O-Methyl-guanosine
  modified_base 25: mod_base = OTHER; note = uridine phosphorothioate
  modified_base 28: mod_base = OTHER; note = 2'-O-Methyl-adenosine
  modified_base 29: mod_base = OTHER; note = 2'-O-Methyl-guanosine
  modified_base 30: mod_base = OTHER; note = 2'-O-Methyl-cytidine
  modified_base 31: mod_base = OTHER; note = 2'-O-Methyl-uridine
  modified_base 32: mod_base = OTHER; note = 2'-O-Methyl-adenosine
  modified_base 33: mod_base = OTHER; note = 2'-O-Methyl-guanosine
  modified_base 34: mod_base = OTHER; note = 2'-O-Methyl-adenosine
  modified_base 35: mod_base = OTHER; note = 2'-O-Methyl-adenosine
  modified_base 36: mod_base = OTHER; note = 2'-O-Methyl-adenosine
  modified_base 37: mod_base = OTHER; note = 2'-O-Methyl-uridine
  modified_base 38: mod_base = OTHER; note = 2'-O-Methyl-adenosine
  modified_base 39: mod_base = OTHER; note = 2'-O-Methyl-guanosine
  modified_base 40: mod_base = OTHER; note = 2'-O-Methyl-cytidine
  modified_base 41: mod_base = OTHER; note = 2'-O-Methyl-adenosine
  modified_base 42: mod_base = OTHER; note = 2'-O-Methyl-adenosine
  modified_base 45: mod_base = OTHER; note = uridine phosphorothioate
  modified_base 46: mod_base = OTHER; note = 2'-O-Methyl-adenosine
  modified_base 48: mod_base = OTHER; note = 2'-O-Methyl-adenosine
  modified_base 50: mod_base = OTHER; note = 2'-O-Methyl-uridine
  modified_base 52: mod_base = OTHER; note = 2'-O-Methyl-adenosine
  modified_base 53: mod_base = OTHER; note = 2'-O-Methyl-guanosine
  modified_base 54: mod_base = OTHER; note = 2'-O-Methyl-guanosine
  modified_base 55: mod_base = OTHER; note = 2'-O-Methyl-cytidine
  modified_base 56: mod_base = OTHER; note = 2'-O-Methyl-uridine
  modified_base 57: mod_base = OTHER; note = 2'-O-Methyl-adenosine
  modified_base 60: mod_base = OTHER; note = 2'-O-Methyl-cytidine
  modified_base 61: mod_base = OTHER; note = 2'-O-Methyl-cytidine
  modified_base 66: mod_base = OTHER; note = 2'-O-Methyl-uridine
  modified_base 67: mod_base = OTHER; note = 2'-O-Methyl-cytidine
  modified_base 70: mod_base = OTHER; note = 2'-O-Methyl-cytidine
  modified_base 71: mod_base = OTHER; note = 2'-O-Methyl-uridine
  modified_base 72: mod_base = OTHER; note = 2'-O-Methyl-uridine
  modified_base 73: mod_base = OTHER; note = 2'-O-Methyl-guanosine
  modified_base 74: mod_base = OTHER; note = 2'-O-Methyl-adenosine
  modified_base 75: mod_base = OTHER; note = 2'-O-Methyl-adenosine
  modified_base 76: mod_base = OTHER; note = 2'-O-Methyl-adenosine
  modified_base 77: mod_base = OTHER; note = 2'-O-Methyl-adenosine
  modified_base 78: mod_base = OTHER; note = 2'-O-Methyl-adenosine
  modified_base 79: mod_base = OTHER; note = 2'-O-Methyl-guanosine
  modified_base 80: mod_base = OTHER; note = 2'-O-Methyl-uridine
  modified_base 81: mod_base = OTHER; note = 2'-O-Methyl-guanosine
  modified_base 83: mod_base = OTHER; note = 2'-O-Methyl-cytidine
  modified_base 84: mod_base = OTHER; note = 2'-O-Methyl-adenosine
  modified_base 85: mod_base = OTHER; note = 2'-O-Methyl-cytidine
  modified_base 86: mod_base = OTHER; note = 2'-O-Methyl-cytidine
  modified_base 87: mod_base = OTHER; note = 2'-O-Methyl-guanosine
  modified_base 88: mod_base = OTHER; note = 2'-O-Methyl-adenosine
  modified_base 89: mod_base = OTHER; note = 2'-O-Methyl-guanosine
  modified_base 90: mod_base = OTHER; note = 2'-O-Methyl-uridine
  modified_base 91: mod_base = OTHER; note = 2'-O-Methyl-cytidine
  modified_base 92: mod_base = OTHER; note = 2'-O-Methyl-guanosine
  modified_base 93: mod_base = OTHER; note = 2'-O-Methyl-guanosine
  modified_base 94: mod_base = OTHER; note = 2'-O-Methyl-uridine
  modified_base 95: mod_base = OTHER; note = 2'-O-Methyl-guanosine
  modified_base 96: mod_base = OTHER; note = 2'-O-Methyl-cytidine
  modified_base 97: mod_base = OTHER; note = 2'-O-Methyl-uridine phosphorothioate
  modified_base 98: mod_base = OTHER; note = 2'-O-Methyl-uridine phosphorothioate
  modified_base 99: mod_base = OTHER; note = 2'-O-Methyl-uridine phosphorothioate
  modified_base 100: mod_base = OTHER; note = 2'-O-Methyl-uridine
  misc_difference 101: note = a, c, g, inosine, u, deoxyadenosine, deoxyguanosine, deoxycytidine, deoxyinosine, thymine, ribonebularine, 2'-O-methylnebularine, or 2'-deoxynebularine
  misc_difference 102: note = a, c, g, inosine, u, deoxyadenosine, deoxyguanosine, deoxycytidine, deoxyinosine, thymine, ribonebularine, 2'-O-methylnebularine, or 2'-deoxynebularine
  misc_difference 103: note = a, c, g, inosine, u, deoxyadenosine, deoxyguanosine, deoxycytidine, deoxyinosine, thymine, ribonebularine, 2'-O-methylnebularine, or 2'-deoxynebularine

SEQ ID NO: 2905 - RNA, 103 nt, synthetic construct; identical to SEQ ID NO: 1795
  source 1..103: mol_type = other RNA
  modified_base 1: mod_base = OTHER; note = 2'-O-Methyl-cytidine phosphorothioate
  modified_base 2: mod_base = OTHER; note = 2'-O-Methyl-cytidine phosphorothioate
  modified_base 3: mod_base = OTHER; note = 2'-O-Methyl-cytidine
  modified_base 21: mod_base = OTHER; note = 2'-O-Methyl-guanosine
  modified_base 25: mod_base = OTHER; note = uridine phosphorothioate
  modified_base 28: mod_base = OTHER; note = 2'-O-Methyl-adenosine
  modified_base 29: mod_base = OTHER; note = 2'-O-Methyl-guanosine
  modified_base 30: mod_base = OTHER; note = 2'-O-Methyl-cytidine
  modified_base 31: mod_base = OTHER; note = 2'-O-Methyl-uridine
  modified_base 32: mod_base = OTHER; note = 2'-O-Methyl-adenosine
  modified_base 34: mod_base = OTHER; note = 2'-O-Methyl-adenosine
  modified_base 35: mod_base = OTHER; note = 2'-O-Methyl-adenosine
  modified_base 36: mod_base = OTHER; note = 2'-O-Methyl-adenosine
  modified_base 37: mod_base = OTHER; note = 2'-O-Methyl-uridine
  modified_base 38: mod_base = OTHER; note = 2'-O-Methyl-adenosine
  modified_base 39: mod_base = OTHER; note = 2'-O-Methyl-guanosine
  modified_base 40: mod_base = OTHER; note = 2'-O-Methyl-cytidine
  modified_base 41: mod_base = OTHER; note = 2'-O-Methyl-adenosine
  modified_base 42: mod_base = OTHER; note = 2'-O-Methyl-adenosine
  modified_base 45: mod_base = OTHER; note = uridine phosphorothioate
  modified_base 46: mod_base = OTHER; note = 2'-O-Methyl-adenosine
  modified_base 48: mod_base = OTHER; note = 2'-O-Methyl-adenosine
  modified_base 50: mod_base = OTHER; note = 2'-O-Methyl-uridine
  modified_base 52: mod_base = OTHER; note = 2'-O-Methyl-adenosine
  modified_base 53: mod_base = OTHER; note = 2'-O-Methyl-guanosine
  modified_base 54: mod_base = OTHER; note = 2'-O-Methyl-guanosine
  modified_base 55: mod_base = OTHER; note = 2'-O-Methyl-cytidine
  modified_base 56: mod_base = OTHER; note = 2'-O-Methyl-uridine
  modified_base 57: mod_base = OTHER; note = 2'-O-Methyl-adenosine
  modified_base 60: mod_base = OTHER; note = 2'-O-Methyl-cytidine
  modified_base 61: mod_base = OTHER; note = 2'-O-Methyl-cytidine
  modified_base 66: mod_base = OTHER; note = 2'-O-Methyl-uridine
  modified_base 67: mod_base = OTHER; note = 2'-O-Methyl-cytidine
  modified_base 70: mod_base = OTHER; note = 2'-O-Methyl-cytidine
  modified_base 71: mod_base = OTHER; note = 2'-O-Methyl-uridine
  modified_base 72: mod_base = OTHER; note = 2'-O-Methyl-uridine
  modified_base 74: mod_base = OTHER; note = 2'-O-Methyl-adenosine
  modified_base 75: mod_base = OTHER; note = 2'-O-Methyl-adenosine
  modified_base 76: mod_base = OTHER; note = 2'-O-Methyl-adenosine
  modified_base 77: mod_base = OTHER; note = 2'-O-Methyl-adenosine
  modified_base 78: mod_base = OTHER; note = 2'-O-Methyl-adenosine
  modified_base 79: mod_base = OTHER; note = 2'-O-Methyl-guanosine
  modified_base 80: mod_base = OTHER; note = 2'-O-Methyl-uridine
  modified_base 81: mod_base = OTHER; note = 2'-O-Methyl-guanosine
  modified_base 83: mod_base = OTHER; note = 2'-O-Methyl-cytidine
  modified_base 84: mod_base = OTHER; note = 2'-O-Methyl-adenosine
  modified_base 85: mod_base = OTHER; note = 2'-O-Methyl-cytidine
  modified_base 86: mod_base = OTHER; note = 2'-O-Methyl-cytidine
  modified_base 87: mod_base = OTHER; note = 2'-O-Methyl-guanosine
  modified_base 88: mod_base = OTHER; note = 2'-O-Methyl-adenosine
  modified_base 89: mod_base = OTHER; note = 2'-O-Methyl-guanosine
  modified_base 90: mod_base = OTHER; note = 2'-O-Methyl-uridine
  modified_base 91: mod_base = OTHER; note = 2'-O-Methyl-cytidine
  modified_base 92: mod_base = OTHER; note = 2'-O-Methyl-guanosine
  modified_base 93: mod_base = OTHER; note = 2'-O-Methyl-guanosine
  modified_base 94: mod_base = OTHER; note = 2'-O-Methyl-uridine
  modified_base 95: mod_base = OTHER; note = 2'-O-Methyl-guanosine
  modified_base 96: mod_base = OTHER; note = 2'-O-Methyl-cytidine
  modified_base 97: mod_base = OTHER; note = 2'-O-Methyl-uridine phosphorothioate
  modified_base 98: mod_base = OTHER; note = 2'-O-Methyl-uridine phosphorothioate
  modified_base 99: mod_base = OTHER; note = 2'-O-Methyl-uridine phosphorothioate
  modified_base 100: mod_base = OTHER; note = 2'-O-Methyl-uridine
  misc_difference 101: note = a, c, g, inosine, u, deoxyadenosine, deoxyguanosine, deoxycytidine, deoxyinosine, thymine, ribonebularine, 2'-O-methylnebularine, or 2'-deoxynebularine
  misc_difference 102: note = a, c, g, inosine, u, deoxyadenosine, deoxyguanosine, deoxycytidine, deoxyinosine, thymine, ribonebularine, 2'-O-methylnebularine, or 2'-deoxynebularine
  misc_difference 103: note = a, c, g, inosine, u, deoxyadenosine, deoxyguanosine, deoxycytidine, deoxyinosine, thymine, ribonebularine, 2'-O-methylnebularine, or 2'-deoxynebularine

SEQ ID NO: 2906 - RNA, 103 nt, synthetic construct; identical to SEQ ID NO: 1796
  source 1..103: mol_type = other RNA
  modified_base 1: mod_base = OTHER; note = 2'-O-Methyl-guanosine phosphorothioate
  modified_base 2: mod_base = OTHER; note = 2'-O-Methyl-adenosine phosphorothioate
  modified_base 3: mod_base = OTHER; note = 2'-O-Methyl-guanosine
  modified_base 21: mod_base = OTHER; note = 2'-O-Methyl-guanosine
  modified_base 25: mod_base = OTHER; note = uridine phosphorothioate
  modified_base 28: mod_base = OTHER; note = 2'-O-Methyl-adenosine
  modified_base 29: mod_base = OTHER; note = 2'-O-Methyl-guanosine
  modified_base 30: mod_base = OTHER; note = 2'-O-Methyl-cytidine
  modified_base 31: mod_base = OTHER; note = 2'-O-Methyl-uridine
  modified_base 32: mod_base = OTHER; note = 2'-O-Methyl-adenosine
  modified_base 33: mod_base = OTHER; note = 2'-O-Methyl-guanosine
  modified_base 34: mod_base = OTHER; note = 2'-O-Methyl-adenosine
  modified_base 35: mod_base = OTHER; note = 2'-O-Methyl-adenosine
  modified_base 36: mod_base = OTHER; note = 2'-O-Methyl-adenosine
  modified_base 37: mod_base = OTHER; note = 2'-O-Methyl-uridine
  modified_base 38: mod_base = OTHER; note = 2'-O-Methyl-adenosine
  modified_base 39: mod_base = OTHER; note = 2'-O-Methyl-guanosine
  modified_base 40: mod_base = OTHER; note = 2'-O-Methyl-cytidine
  modified_base 41: mod_base = OTHER; note = 2'-O-Methyl-adenosine
  modified_base 42: mod_base = OTHER; note = 2'-O-Methyl-adenosine
  modified_base 45: mod_base = OTHER; note = uridine phosphorothioate
  modified_base 46: mod_base = OTHER; note = 2'-O-Methyl-adenosine
  modified_base 48: mod_base = OTHER; note = 2'-O-Methyl-adenosine
  modified_base 50: mod_base = OTHER; note = 2'-O-Methyl-uridine
  modified_base 52: mod_base = OTHER; note = 2'-O-Methyl-adenosine
  modified_base 53: mod_base = OTHER; note = 2'-O-Methyl-guanosine
  modified_base 54: mod_base = OTHER; note = 2'-O-Methyl-guanosine
  modified_base 55: mod_base = OTHER; note = 2'-O-Methyl-cytidine
  modified_base 56: mod_base = OTHER; note = 2'-O-Methyl-uridine
  modified_base 57: mod_base = OTHER; note = 2'-O-Methyl-adenosine
  modified_base 60: mod_base = OTHER; note = 2'-O-Methyl-cytidine
  modified_base 61: mod_base = OTHER; note = 2'-O-Methyl-cytidine
  modified_base 66: mod_base = OTHER; note = 2'-O-Methyl-uridine
  modified_base 67: mod_base = OTHER; note = 2'-O-Methyl-cytidine
  modified_base 70: mod_base = OTHER; note = 2'-O-Methyl-cytidine
  modified_base 71: mod_base = OTHER; note = 2'-O-Methyl-uridine
  modified_base 72: mod_base = OTHER; note = 2'-O-Methyl-uridine
  modified_base 73: mod_base = OTHER; note = 2'-O-Methyl-guanosine
  modified_base 74: mod_base = OTHER; note = 2'-O-Methyl-adenosine
  modified_base 75: mod_base = OTHER; note = 2'-O-Methyl-adenosine
  modified_base 76: mod_base = OTHER; note = 2'-O-Methyl-adenosine
  modified_base 77: mod_base = OTHER; note = 2'-O-Methyl-adenosine
  modified_base 78: mod_base = OTHER; note = 2'-O-Methyl-adenosine
  modified_base 79: mod_base = OTHER; note = 2'-O-Methyl-guanosine
  modified_base 80: mod_base = OTHER; note = 2'-O-Methyl-uridine
  modified_base 81: mod_base = OTHER; note = 2'-O-Methyl-guanosine
  modified_base 83: mod_base = OTHER; note = 2'-O-Methyl-cytidine
  modified_base 84: mod_base = OTHER; note = 2'-O-Methyl-adenosine
  modified_base 85: mod_base = OTHER; note = 2'-O-Methyl-cytidine
  modified_base 86: mod_base = OTHER; note = 2'-O-Methyl-cytidine
  modified_base 87: mod_base = OTHER; note = 2'-O-Methyl-guanosine
  modified_base 88: mod_base = OTHER; note = 2'-O-Methyl-adenosine
  modified_base 89: mod_base = OTHER; note = 2'-O-Methyl-guanosine
  modified_base 90: mod_base = OTHER; note = 2'-O-Methyl-uridine
  modified_base 91: mod_base = OTHER; note = 2'-O-Methyl-cytidine
  modified_base 92: mod_base = OTHER; note = 2'-O-Methyl-guanosine
  modified_base 93: mod_base = OTHER; note = 2'-O-Methyl-guanosine
  modified_base 94: mod_base = OTHER; note = 2'-O-Methyl-uridine
  modified_base 95: mod_base = OTHER; note = 2'-O-Methyl-guanosine
  modified_base 96: mod_base = OTHER; note = 2'-O-Methyl-cytidine
  modified_base 97: mod_base = OTHER; note = 2'-O-Methyl-uridine phosphorothioate
  modified_base 98: mod_base = OTHER; note = 2'-O-Methyl-uridine phosphorothioate
  modified_base 99: mod_base = OTHER; note = 2'-O-Methyl-uridine phosphorothioate
  modified_base 100: mod_base = OTHER; note = 2'-O-Methyl-uridine
  misc_difference 101: note = a, c, g, inosine, u, deoxyadenosine, deoxyguanosine, deoxycytidine, deoxyinosine, thymine, ribonebularine, 2'-O-methylnebularine, or 2'-deoxynebularine
  misc_difference 102: note = a, c, g, inosine, u, deoxyadenosine, deoxyguanosine, deoxycytidine, deoxyinosine, thymine, ribonebularine, 2'-O-methylnebularine, or 2'-deoxynebularine
  misc_difference 103: note = a, c, g, inosine, u, deoxyadenosine, deoxyguanosine, deoxycytidine, deoxyinosine, thymine, ribonebularine, 2'-O-methylnebularine, or 2'-deoxynebularine

SEQ ID NO: 2907 - RNA, 103 nt, synthetic construct; identical to SEQ ID NO: 1796
  source 1..103: mol_type = other RNA
  modified_base 1: mod_base = OTHER; note = 2'-O-Methyl-guanosine phosphorothioate
  modified_base 2: mod_base = OTHER; note = 2'-O-Methyl-adenosine phosphorothioate
  modified_base 3: mod_base = OTHER; note = 2'-O-Methyl-guanosine
  modified_base 21: mod_base = OTHER; note = 2'-O-Methyl-guanosine
  modified_base 25: mod_base = OTHER; note = uridine phosphorothioate
  modified_base 28: mod_base = OTHER; note = 2'-O-Methyl-adenosine
  modified_base 29: mod_base = OTHER; note = 2'-O-Methyl-guanosine
  modified_base 30: mod_base = OTHER; note = 2'-O-Methyl-cytidine
  modified_base 31: mod_base = OTHER; note = 2'-O-Methyl-uridine
  modified_base 32: mod_base = OTHER; note = 2'-O-Methyl-adenosine
  modified_base 34: mod_base = OTHER; note = 2'-O-Methyl-adenosine
  modified_base 35: mod_base = OTHER; note = 2'-O-Methyl-adenosine
  modified_base 36: mod_base = OTHER; note = 2'-O-Methyl-adenosine
  modified_base 37: mod_base = OTHER; note = 2'-O-Methyl-uridine
  modified_base 38: mod_base = OTHER; note = 2'-O-Methyl-adenosine
  modified_base 39: mod_base = OTHER; note = 2'-O-Methyl-guanosine
  modified_base 40: mod_base = OTHER; note = 2'-O-Methyl-cytidine
  modified_base 41: mod_base = OTHER; note = 2'-O-Methyl-adenosine
  modified_base 42: mod_base = OTHER; note = 2'-O-Methyl-adenosine
  modified_base 45: mod_base = OTHER; note = uridine phosphorothioate
  modified_base 46: mod_base = OTHER; note = 2'-O-Methyl-adenosine
  modified_base 48: mod_base = OTHER; note = 2'-O-Methyl-adenosine
  modified_base 50: mod_base = OTHER; note = 2'-O-Methyl-uridine
  modified_base 52: mod_base = OTHER; note = 2'-O-Methyl-adenosine
  modified_base 53: mod_base = OTHER; note = 2'-O-Methyl-guanosine
  modified_base 54: mod_base = OTHER; note = 2'-O-Methyl-guanosine
  modified_base 55: mod_base = OTHER; note = 2'-O-Methyl-cytidine
  modified_base 56: mod_base = OTHER; note = 2'-O-Methyl-uridine
  modified_base 57: mod_base = OTHER; note = 2'-O-Methyl-adenosine
  modified_base 60: mod_base = OTHER; note = 2'-O-Methyl-cytidine
  modified_base 61: mod_base = OTHER; note = 2'-O-Methyl-cytidine
  modified_base 66: mod_base = OTHER; note = 2'-O-Methyl-uridine
  modified_base 67: mod_base = OTHER; note = 2'-O-Methyl-cytidine
  modified_base 70: mod_base = OTHER; note = 2'-O-Methyl-cytidine
  modified_base 71: mod_base = OTHER; note = 2'-O-Methyl-uridine
  modified_base 72: mod_base = OTHER; note = 2'-O-Methyl-uridine
  modified_base 74: mod_base = OTHER; note = 2'-O-Methyl-adenosine
  modified_base 75: mod_base = OTHER; note = 2'-O-Methyl-adenosine
  modified_base 76: mod_base = OTHER; note = 2'-O-Methyl-adenosine
  modified_base 77: mod_base = OTHER; note = 2'-O-Methyl-adenosine
  modified_base 78: mod_base = OTHER; note = 2'-O-Methyl-adenosine
  modified_base 79: mod_base = OTHER; note = 2'-O-Methyl-guanosine
  modified_base 80: mod_base = OTHER; note = 2'-O-Methyl-uridine
  modified_base 81: mod_base = OTHER; note = 2'-O-Methyl-guanosine
  modified_base 83: mod_base = OTHER; note = 2'-O-Methyl-cytidine
  modified_base 84: mod_base = OTHER; note = 2'-O-Methyl-adenosine
  modified_base 85: mod_base = OTHER; note = 2'-O-Methyl-cytidine
  modified_base 86: mod_base = OTHER; note = 2'-O-Methyl-cytidine
  modified_base 87: mod_base = OTHER; note = 2'-O-Methyl-guanosine
  modified_base 88: mod_base = OTHER; note = 2'-O-Methyl-adenosine
  modified_base 89: mod_base = OTHER; note = 2'-O-Methyl-guanosine
  modified_base 90: mod_base = OTHER; note = 2'-O-Methyl-uridine
  modified_base 91: mod_base = OTHER; note = 2'-O-Methyl-cytidine
  modified_base 92: mod_base = OTHER; note = 2'-O-Methyl-guanosine
  modified_base 93: mod_base = OTHER; note = 2'-O-Methyl-guanosine
  modified_base 94: mod_base = OTHER; note = 2'-O-Methyl-uridine
  modified_base 95: mod_base = OTHER; note = 2'-O-Methyl-guanosine
  modified_base 96: mod_base = OTHER; note = 2'-O-Methyl-cytidine
  modified_base 97: mod_base = OTHER; note = 2'-O-Methyl-uridine phosphorothioate
  modified_base 98: mod_base = OTHER; note = 2'-O-Methyl-uridine phosphorothioate
  modified_base 99: mod_base = OTHER; note = 2'-O-Methyl-uridine phosphorothioate
  modified_base 100: mod_base = OTHER; note = 2'-O-Methyl-uridine
  misc_difference 101: note = a, c, g, inosine, u, deoxyadenosine, deoxyguanosine, deoxycytidine, deoxyinosine, thymine, ribonebularine, 2'-O-methylnebularine, or 2'-deoxynebularine
  misc_difference 102: note = a, c, g, inosine, u, deoxyadenosine, deoxyguanosine, deoxycytidine, deoxyinosine, thymine, ribonebularine, 2'-O-methylnebularine, or 2'-deoxynebularine
  misc_difference 103: note = a, c, g, inosine, u, deoxyadenosine, deoxyguanosine, deoxycytidine, deoxyinosine, thymine, ribonebularine, 2'-O-methylnebularine, or 2'-deoxynebularine

SEQ ID NO: 2908 - RNA, 103 nt, synthetic construct; identical to SEQ ID NO: 1797
  source 1..103: mol_type = other RNA
  modified_base 1: mod_base = OTHER; note = 2'-O-Methyl-cytidine phosphorothioate
  modified_base 2: mod_base = OTHER; note = 2'-O-Methyl-adenosine phosphorothioate
  modified_base 3: mod_base = OTHER; note = 2'-O-Methyl-guanosine
  modified_base 21: mod_base = OTHER; note = 2'-O-Methyl-guanosine
  modified_base 25: mod_base = OTHER; note = uridine phosphorothioate
  modified_base 28: mod_base = OTHER; note = 2'-O-Methyl-adenosine
  modified_base 29: mod_base = OTHER; note = 2'-O-Methyl-guanosine
  modified_base 30: mod_base = OTHER; note = 2'-O-Methyl-cytidine
  modified_base 31: mod_base = OTHER; note = 2'-O-Methyl-uridine
  modified_base 32: mod_base = OTHER; note = 2'-O-Methyl-adenosine
  modified_base 33: mod_base = OTHER; note = 2'-O-Methyl-guanosine
  modified_base 34: mod_base = OTHER; note = 2'-O-Methyl-adenosine
  modified_base 35: mod_base = OTHER; note = 2'-O-Methyl-adenosine
  modified_base 36: mod_base = OTHER; note = 2'-O-Methyl-adenosine
  modified_base 37: mod_base = OTHER; note = 2'-O-Methyl-uridine
  modified_base 38: mod_base = OTHER; note = 2'-O-Methyl-adenosine
  modified_base 39: mod_base = OTHER; note = 2'-O-Methyl-guanosine
  modified_base 40: mod_base = OTHER; note = 2'-O-Methyl-cytidine
  modified_base 41: mod_base = OTHER; note = 2'-O-Methyl-adenosine
  modified_base 42: mod_base = OTHER; note = 2'-O-Methyl-adenosine
  modified_base 45: mod_base = OTHER; note = uridine phosphorothioate
  modified_base 46: mod_base = OTHER; note = 2'-O-Methyl-adenosine
  modified_base 48: mod_base = OTHER; note = 2'-O-Methyl-adenosine
  modified_base 50: mod_base = OTHER; note = 2'-O-Methyl-uridine
  modified_base 52: mod_base = OTHER; note = 2'-O-Methyl-adenosine
  modified_base 53: mod_base = OTHER; note = 2'-O-Methyl-guanosine
  modified_base 54: mod_base = OTHER; note = 2'-O-Methyl-guanosine
  modified_base 57: mod_base = OTHER; note = 2'-O-Methyl-adenosine
  modified_base 61: mod_base = OTHER; note = 2'-O-Methyl-cytidine
  modified_base 66: mod_base = OTHER; note = 2'-O-Methyl-uridine
  modified_base 67: mod_base = OTHER; note = 2'-O-Methyl-cytidine
  modified_base 70: mod_base = OTHER; note = 2'-O-Methyl-cytidine
  modified_base 71: mod_base = OTHER; note = 2'-O-Methyl-uridine
  modified_base 72: mod_base = OTHER; note = 2'-O-Methyl-uridine
  modified_base 74: mod_base = OTHER; note = 2'-O-Methyl-adenosine
  modified_base 75: mod_base = OTHER; note = 2'-O-Methyl-adenosine
  modified_base 76: mod_base = OTHER; note = 2'-O-Methyl-adenosine
  modified_base 77: mod_base = OTHER; note = 2'-O-Methyl-adenosine
  modified_base 78: mod_base = OTHER; note = 2'-O-Methyl-adenosine
  modified_base 79: mod_base = OTHER; note = 2'-O-Methyl-guanosine
  modified_base 80: mod_base = OTHER; note = 2'-O-Methyl-uridine
  modified_base 82: mod_base = OTHER; note = 2'-O-Methyl-guanosine
  modified_base 83: mod_base = OTHER; note = 2'-O-Methyl-cytidine
  modified_base 84: mod_base = OTHER; note = 2'-O-Methyl-adenosine
  modified_base 85: mod_base = OTHER; note = 2'-O-Methyl-cytidine
  modified_base 86: mod_base = OTHER; note = 2'-O-Methyl-cytidine
  modified_base 87: mod_base = OTHER; note = 2'-O-Methyl-guanosine
  modified_base 89: mod_base = OTHER; note = 2'-O-Methyl-guanosine
  modified_base 92: mod_base = OTHER; note = 2'-O-Methyl-guanosine
  modified_base 93: mod_base = OTHER; note = 2'-O-Methyl-guanosine
  modified_base 94: mod_base = OTHER; note = 2'-O-Methyl-uridine
  modified_base 95: mod_base = OTHER; note = 2'-O-Methyl-guanosine
  modified_base 96: mod_base = OTHER; note = 2'-O-Methyl-cytidine
  modified_base 97: mod_base = OTHER; note = 2'-O-Methyl-uridine phosphorothioate
  modified_base 98: mod_base = OTHER; note = 2'-O-Methyl-uridine phosphorothioate
  modified_base 99: mod_base = OTHER; note = 2'-O-Methyl-uridine phosphorothioate
  modified_base 100: mod_base = OTHER; note = 2'-O-Methyl-uridine
  misc_difference 101: note = a, c, g, inosine, u, deoxyadenosine, deoxyguanosine, deoxycytidine, deoxyinosine, thymine, ribonebularine, 2'-O-methylnebularine, or 2'-deoxynebularine
  misc_difference 102: note = a, c, g, inosine, u, deoxyadenosine, deoxyguanosine, deoxycytidine, deoxyinosine, thymine, ribonebularine, 2'-O-methylnebularine, or 2'-deoxynebularine
  misc_difference 103: note = a, c, g, inosine, u, deoxyadenosine, deoxyguanosine, deoxycytidine, deoxyinosine, thymine, ribonebularine, 2'-O-methylnebularine, or 2'-deoxynebularine

SEQ ID NO: 2909 - RNA, 103 nt, synthetic construct; identical to SEQ ID NO: 1797
  source 1..103: mol_type = other RNA
  modified_base 1: mod_base = OTHER; note = 2'-O-Methyl-cytidine phosphorothioate
  modified_base 2: mod_base = OTHER; note = 2'-O-Methyl-adenosine phosphorothioate
  modified_base 3: mod_base = OTHER; note = 2'-O-Methyl-guanosine
  modified_base 21: mod_base = OTHER; note = 2'-O-Methyl-guanosine
  modified_base 25: mod_base = OTHER; note = uridine phosphorothioate
  modified_base 28: mod_base = OTHER; note = 2'-O-Methyl-adenosine
  modified_base 29: mod_base = OTHER; note = 2'-O-Methyl-guanosine
  modified_base 30: mod_base = OTHER; note = 2'-O-Methyl-cytidine
  modified_base 31: mod_base = OTHER; note = 2'-O-Methyl-uridine
  modified_base 32: mod_base = OTHER; note = 2'-O-Methyl-adenosine
  modified_base 33: mod_base = OTHER; note = 2'-O-Methyl-guanosine
  modified_base 34: mod_base = OTHER; note = 2'-O-Methyl-adenosine
  modified_base 35: mod_base = OTHER; note = 2'-O-Methyl-adenosine
  modified_base 36: mod_base = OTHER; note = 2'-O-Methyl-adenosine
  modified_base 37: mod_base = OTHER; note = 2'-O-Methyl-uridine
  modified_base 38: mod_base = OTHER; note = 2'-O-Methyl-adenosine
  modified_base 39: mod_base = OTHER; note = 2'-O-Methyl-guanosine
  modified_base 40: mod_base = OTHER; note = 2'-O-Methyl-cytidine
  modified_base 41: mod_base = OTHER; note = 2'-O-Methyl-adenosine
  modified_base 42: mod_base = OTHER; note = 2'-O-Methyl-adenosine
  modified_base 45: mod_base = OTHER; note = uridine phosphorothioate
  modified_base 46: mod_base = OTHER; note = 2'-O-Methyl-adenosine
  modified_base 48: mod_base = OTHER; note = 2'-O-Methyl-adenosine
  modified_base 50: mod_base = OTHER; note = 2'-O-Methyl-uridine
  modified_base 52: mod_base = OTHER; note = 2'-O-Methyl-adenosine
  modified_base 53: mod_base = OTHER; note = 2'-O-Methyl-guanosine
  modified_base 54: mod_base = OTHER; note = 2'-O-Methyl-guanosine
  modified_base 55: mod_base = OTHER; note = 2'-O-Methyl-cytidine
  modified_base 56: mod_base = OTHER; note = 2'-O-Methyl-uridine
  modified_base 57: mod_base = OTHER; note = 2'-O-Methyl-adenosine
  modified_base 60: mod_base = OTHER; note = 2'-O-Methyl-cytidine
  modified_base 61: mod_base = OTHER; note = 2'-O-Methyl-cytidine
  modified_base 66: mod_base = OTHER; note = 2'-O-Methyl-uridine
  modified_base 67: mod_base = OTHER; note = 2'-O-Methyl-cytidine
  modified_base 70: mod_base = OTHER; note = 2'-O-Methyl-cytidine
  modified_base 71: mod_base = OTHER; note = 2'-O-Methyl-uridine
  modified_base 72: mod_base = OTHER; note = 2'-O-Methyl-uridine
  modified_base 74: mod_base = OTHER; note = 2'-O-Methyl-adenosine
  modified_base 75: mod_base = OTHER; note = 2'-O-Methyl-adenosine
  modified_base 76: mod_base = OTHER; note = 2'-O-Methyl-adenosine
  modified_base 77: mod_base = OTHER; note = 2'-O-Methyl-adenosine
  modified_base 78: mod_base = OTHER; note = 2'-O-Methyl-adenosine
  modified_base 79: mod_base = OTHER; note = 2'-O-Methyl-guanosine
  modified_base 80: mod_base = OTHER; note = 2'-O-Methyl-uridine
  modified_base 82: mod_base = OTHER; note = 2'-O-Methyl-guanosine
  modified_base 83: mod_base = OTHER; note = 2'-O-Methyl-cytidine
  modified_base 84: mod_base = OTHER; note = 2'-O-Methyl-adenosine
  modified_base 85: mod_base = OTHER; note = 2'-O-Methyl-cytidine
  modified_base 86: mod_base = OTHER; note = 2'-O-Methyl-cytidine
  modified_base 87: mod_base = OTHER; note = 2'-O-Methyl-guanosine
  modified_base 89: mod_base = OTHER; note = 2'-O-Methyl-guanosine
  modified_base 92: mod_base = OTHER; note = 2'-O-Methyl-guanosine
  modified_base 93: mod_base = OTHER; note = 2'-O-Methyl-guanosine
  modified_base 94: mod_base = OTHER; note = 2'-O-Methyl-uridine
  modified_base 95: mod_base = OTHER; note = 2'-O-Methyl-guanosine
  modified_base 96: mod_base = OTHER; note = 2'-O-Methyl-cytidine
  modified_base 97: mod_base = OTHER; note = 2'-O-Methyl-uridine phosphorothioate
  modified_base 98: mod_base = OTHER; note = 2'-O-Methyl-uridine phosphorothioate
  modified_base 99: mod_base = OTHER; note = 2'-O-Methyl-uridine phosphorothioate
  modified_base 100: mod_base = OTHER; note = 2'-O-Methyl-uridine
  misc_difference 101: note = a, c, g, inosine, u, deoxyadenosine, deoxyguanosine, deoxycytidine, deoxyinosine, thymine, ribonebularine, 2'-O-methylnebularine, or 2'-deoxynebularine
  misc_difference 102: note = a, c, g, inosine, u, deoxyadenosine, deoxyguanosine, deoxycytidine, deoxyinosine, thymine, ribonebularine, 2'-O-methylnebularine, or 2'-deoxynebularine
  misc_difference 103: note = a, c, g, inosine, u, deoxyadenosine, deoxyguanosine, deoxycytidine, deoxyinosine, thymine, ribonebularine, 2'-O-methylnebularine, or 2'-deoxynebularine

SEQ ID NO: 2910 - RNA, 103 nt, synthetic construct; identical to SEQ ID NO: 1797
  source 1..103: mol_type = other RNA
  modified_base 1: mod_base = OTHER; note = 2'-O-Methyl-cytidine phosphorothioate
  modified_base 2: mod_base = OTHER; note = 2'-O-Methyl-adenosine phosphorothioate
  modified_base 3: mod_base = OTHER; note = 2'-O-Methyl-guanosine
  modified_base 21: mod_base = OTHER; note = 2'-O-Methyl-guanosine
  modified_base 25: mod_base = OTHER; note = uridine phosphorothioate
  modified_base 28: mod_base = OTHER; note = 2'-O-Methyl-adenosine
  modified_base 29: mod_base = OTHER; note = 2'-O-Methyl-guanosine
  modified_base 30: mod_base = OTHER; note = 2'-O-Methyl-cytidine
  modified_base 31: mod_base = OTHER; note = 2'-O-Methyl-uridine
  modified_base 32: mod_base = OTHER; note = 2'-O-Methyl-adenosine
  modified_base 33: mod_base = OTHER; note = 2'-O-Methyl-guanosine
  modified_base 34: mod_base = OTHER; note = 2'-O-Methyl-adenosine
  modified_base 35: mod_base = OTHER; note = 2'-O-Methyl-adenosine
  modified_base 36: mod_base = OTHER; note = 2'-O-Methyl-adenosine
  modified_base 37: mod_base = OTHER; note = 2'-O-Methyl-uridine
  modified_base 38: mod_base = OTHER; note = 2'-O-Methyl-adenosine
  modified_base 39: mod_base = OTHER; note = 2'-O-Methyl-guanosine
  modified_base 40: mod_base = OTHER; note = 2'-O-Methyl-cytidine
  modified_base 41: mod_base = OTHER; note = 2'-O-Methyl-adenosine
  modified_base 42: mod_base = OTHER; note = 2'-O-Methyl-adenosine
  modified_base 45: mod_base = OTHER; note = uridine phosphorothioate
  modified_base 46: mod_base = OTHER; note = 2'-O-Methyl-adenosine
  modified_base 48: mod_base = OTHER; note = 2'-O-Methyl-adenosine
  modified_base 50: mod_base = OTHER; note = 2'-O-Methyl-uridine
  modified_base 52: mod_base = OTHER; note = 2'-O-Methyl-adenosine
  modified_base 53: mod_base = OTHER; note = 2'-O-Methyl-guanosine
  modified_base 54: mod_base = OTHER; note = 2'-O-Methyl-guanosine
  modified_base 57: mod_base = OTHER; note = 2'-O-Methyl-adenosine
  modified_base 61: mod_base = OTHER; note = 2'-O-Methyl-cytidine
  modified_base 66: mod_base = OTHER; note = 2'-O-Methyl-uridine
  modified_base 67: mod_base = OTHER; note = 2'-O-Methyl-cytidine
  modified_base 70: mod_base = OTHER; note = 2'-O-Methyl-cytidine
  modified_base 71: mod_base = OTHER; note = 2'-O-Methyl-uridine
  modified_base 72: mod_base = OTHER; note = 2'-O-Methyl-uridine
  modified_base 73: mod_base = OTHER; note = 2'-O-Methyl-guanosine
  modified_base 74: mod_base = OTHER; note = 2'-O-Methyl-adenosine
  modified_base 75: mod_base = OTHER; note = 2'-O-Methyl-adenosine
  modified_base 76: mod_base = OTHER; note = 2'-O-Methyl-adenosine
  modified_base 77: mod_base = OTHER; note = 2'-O-Methyl-adenosine
  modified_base 78: mod_base = OTHER; note = 2'-O-Methyl-adenosine
  modified_base 79: mod_base = OTHER; note = 2'-O-Methyl-guanosine
  modified_base 80: mod_base = OTHER; note = 2'-O-Methyl-uridine
  modified_base 82: mod_base = OTHER; note = 2'-O-Methyl-guanosine
  modified_base 83: mod_base = OTHER; note = 2'-O-Methyl-cytidine
  modified_base 84: mod_base = OTHER; note = 2'-O-Methyl-adenosine
  modified_base 85: mod_base = OTHER; note = 2'-O-Methyl-cytidine
  modified_base 86: mod_base = OTHER; note = 2'-O-Methyl-cytidine
  modified_base 87: mod_base = OTHER; note = 2'-O-Methyl-guanosine
  modified_base 89: mod_base = OTHER; note = 2'-O-Methyl-guanosine
  modified_base 92: mod_base = OTHER; note = 2'-O-Methyl-guanosine
  modified_base 93: mod_base = OTHER; note = 2'-O-Methyl-guanosine
  modified_base 94: mod_base = OTHER; note = 2'-O-Methyl-uridine
  modified_base 95: mod_base = OTHER; note = 2'-O-Methyl-guanosine
  modified_base 96: mod_base = OTHER; note = 2'-O-Methyl-cytidine
  modified_base 97: mod_base = OTHER; note = 2'-O-Methyl-uridine phosphorothioate
  modified_base 98: mod_base = OTHER; note = 2'-O-Methyl-uridine phosphorothioate
  modified_base 99: mod_base = OTHER; note = 2'-O-Methyl-uridine phosphorothioate
  modified_base 100: mod_base = OTHER; note = 2'-O-Methyl-uridine
  misc_difference 101: note = a, c, g, inosine, u, deoxyadenosine, deoxyguanosine, deoxycytidine, deoxyinosine, thymine, ribonebularine, 2'-O-methylnebularine, or 2'-deoxynebularine
  misc_difference 102: note = a, c, g, inosine, u, deoxyadenosine, deoxyguanosine, deoxycytidine, deoxyinosine, thymine, ribonebularine, 2'-O-methylnebularine, or 2'-deoxynebularine
  misc_difference 103: note = a, c, g, inosine, u, deoxyadenosine, deoxyguanosine, deoxycytidine, deoxyinosine, thymine, ribonebularine, 2'-O-methylnebularine, or 2'-deoxynebularine

SEQ ID NO: 2911 - RNA, 103 nt, synthetic construct; identical to SEQ ID NO: 1797
  source 1..103: mol_type = other RNA
  modified_base 1: mod_base = OTHER; note = 2'-O-Methyl-cytidine phosphorothioate
  modified_base 2: mod_base = OTHER; note = 2'-O-Methyl-adenosine phosphorothioate
  modified_base 3: mod_base = OTHER; note = 2'-O-Methyl-guanosine
  modified_base 21: mod_base = OTHER; note = 2'-O-Methyl-guanosine
  modified_base 25: mod_base = OTHER; note = uridine phosphorothioate
  modified_base 28: mod_base = OTHER; note = 2'-O-Methyl-adenosine
  modified_base 29: mod_base = OTHER; note = 2'-O-Methyl-guanosine
  modified_base 30: mod_base = OTHER; note = 2'-O-Methyl-cytidine
  modified_base 31: mod_base = OTHER; note = 2'-O-Methyl-uridine
  modified_base 32: mod_base = OTHER; note = 2'-O-Methyl-adenosine
  modified_base 33: mod_base = OTHER; note = 2'-O-Methyl-guanosine
  modified_base 34: mod_base = OTHER; note = 2'-O-Methyl-adenosine
  modified_base 35: mod_base = OTHER; note = 2'-O-Methyl-adenosine
  modified_base 36: mod_base = OTHER; note = 2'-O-Methyl-adenosine
  modified_base 37: mod_base = OTHER; note = 2'-O-Methyl-uridine
  modified_base 38: mod_base = OTHER; note = 2'-O-Methyl-adenosine
  modified_base 39: mod_base = OTHER; note = 2'-O-Methyl-guanosine
  modified_base 40: mod_base = OTHER; note = 2'-O-Methyl-cytidine
  modified_base 41: mod_base = OTHER; note = 2'-O-Methyl-adenosine
  modified_base 42: mod_base = OTHER; note = 2'-O-Methyl-adenosine
  modified_base 45: mod_base = OTHER; note = uridine phosphorothioate
  modified_base 46: mod_base = OTHER; note = 2'-O-Methyl-adenosine
  modified_base 48: mod_base = OTHER; note = 2'-O-Methyl-adenosine
  modified_base 50: mod_base = OTHER; note = 2'-O-Methyl-uridine
  modified_base 52: mod_base = OTHER; note = 2'-O-Methyl-adenosine
  modified_base 53: mod_base = OTHER; note = 2'-O-Methyl-guanosine
  modified_base 54: mod_base = OTHER; note = 2'-O-Methyl-guanosine
  modified_base 57: mod_base = OTHER; note = 2'-O-Methyl-adenosine
  modified_base 61: mod_base = OTHER; note = 2'-O-Methyl-cytidine
  modified_base 66: mod_base = OTHER; note = 2'-O-Methyl-uridine
  modified_base 67: mod_base = OTHER; note = 2'-O-Methyl-cytidine
  modified_base 70: mod_base = OTHER; note = 2'-O-Methyl-cytidine
  modified_base 71: mod_base = OTHER; note = 2'-O-Methyl-uridine
  modified_base 72: mod_base = OTHER; note = 2'-O-Methyl-uridine
  modified_base 73: mod_base = OTHER; note = 2'-O-Methyl-guanosine
  modified_base 74: mod_base = OTHER; note = 2'-O-Methyl-adenosine
  modified_base 75: mod_base = OTHER; note = 2'-O-Methyl-adenosine
  modified_base 76: mod_base = OTHER; note = 2'-O-Methyl-adenosine
  modified_base 77: mod_base = OTHER; note = 2'-O-Methyl-adenosine
  modified_base 78: mod_base = OTHER; note = 2'-O-Methyl-adenosine
  modified_base 79: mod_base = OTHER; note = 2'-O-Methyl-guanosine
  modified_base 80: mod_base = OTHER; note = 2'-O-Methyl-uridine
  modified_base 82: mod_base = OTHER; note = 2'-O-Methyl-guanosine
  modified_base 83: mod_base = OTHER; note = 2'-O-Methyl-cytidine
  modified_base 84: mod_base = OTHER; note = 2'-O-Methyl-adenosine
  modified_base 85: mod_base = OTHER; note = 2'-O-Methyl-cytidine
  modified_base 86: mod_base = OTHER; note = 2'-O-Methyl-cytidine
  modified_base 87: mod_base = OTHER; note = 2'-O-Methyl-guanosine
  modified_base 89: mod_base = OTHER; note = 2'-O-Methyl-guanosine
  modified_base 91: mod_base = OTHER; note = 2'-O-Methyl-cytidine
  modified_base 92: mod_base = OTHER; note = 2'-O-Methyl-guanosine
  modified_base 93: mod_base = OTHER; note = 2'-O-Methyl-guanosine
  modified_base 94: mod_base = OTHER; note = 2'-O-Methyl-uridine
  modified_base 95: mod_base = OTHER; note = 2'-O-Methyl-guanosine
  modified_base 96: mod_base = OTHER; note = 2'-O-Methyl-cytidine
  modified_base 97: mod_base = OTHER; note = 2'-O-Methyl-uridine phosphorothioate
  modified_base 98: mod_base = OTHER; note = 2'-O-Methyl-uridine phosphorothioate
  modified_base 99: mod_base = OTHER; note = 2'-O-Methyl-uridine phosphorothioate
  modified_base 100: mod_base = OTHER; note = 2'-O-Methyl-uridine
  misc_difference 101: note = a, c, g, inosine, u, deoxyadenosine, deoxyguanosine, deoxycytidine, deoxyinosine, thymine, ribonebularine, 2'-O-methylnebularine, or 2'-deoxynebularine
  misc_difference 102: note = a, c, g, inosine, u, deoxyadenosine, deoxyguanosine, deoxycytidine, deoxyinosine, thymine, ribonebularine, 2'-O-methylnebularine, or 2'-deoxynebularine
  misc_difference 103: note = a, c, g, inosine, u, deoxyadenosine, deoxyguanosine, deoxycytidine, deoxyinosine, thymine, ribonebularine, 2'-O-methylnebularine, or 2'-deoxynebularine

SEQ ID NO: 2912 - RNA, 103 nt, synthetic construct; identical to SEQ ID NO: 1797
  source 1..103: mol_type = other RNA
  modified_base 1: mod_base = OTHER; note = 2'-O-Methyl-cytidine phosphorothioate
  modified_base 2: mod_base = OTHER; note = 2'-O-Methyl-adenosine phosphorothioate
  modified_base 3: mod_base = OTHER; note = 2'-O-Methyl-guanosine
  modified_base 21: mod_base = OTHER; note = 2'-O-Methyl-guanosine
  modified_base 25: mod_base = OTHER; note = uridine phosphorothioate
  modified_base 28: mod_base = OTHER; note = 2'-O-Methyl-adenosine
  modified_base 29: mod_base = OTHER; note = 2'-O-Methyl-guanosine
  modified_base 30: mod_base = OTHER; note = 2'-O-Methyl-cytidine
  modified_base 31: mod_base = OTHER; note = 2'-O-Methyl-uridine
  modified_base 32: mod_base = OTHER; note = 2'-O-Methyl-adenosine
  modified_base 34: mod_base = OTHER; note = 2'-O-Methyl-adenosine
  modified_base 35: mod_base = OTHER; note = 2'-O-Methyl-adenosine
  modified_base 36: mod_base = OTHER; note = 2'-O-Methyl-adenosine
  modified_base 37: mod_base = OTHER; note = 2'-O-Methyl-uridine
  modified_base 38: mod_base = OTHER; note = 2'-O-Methyl-adenosine
  modified_base 39: mod_base = OTHER; note = 2'-O-Methyl-guanosine
  modified_base 40: mod_base = OTHER; note = 2'-O-Methyl-cytidine
  modified_base 41: mod_base = OTHER; note = 2'-O-Methyl-adenosine
  modified_base 42: mod_base = OTHER; note = 2'-O-Methyl-adenosine
  modified_base 45: mod_base = OTHER; note = uridine phosphorothioate
  modified_base 46: mod_base = OTHER; note = 2'-O-Methyl-adenosine
  modified_base 48: mod_base = OTHER; note = 2'-O-Methyl-adenosine
  modified_base 50: mod_base = OTHER; note = 2'-O-Methyl-uridine
  modified_base 52: mod_base = OTHER; note = 2'-O-Methyl-adenosine
  modified_base 53: mod_base = OTHER; note = 2'-O-Methyl-guanosine
  modified_base 54: mod_base = OTHER; note = 2'-O-Methyl-guanosine
  modified_base 57: mod_base = OTHER; note = 2'-O-Methyl-adenosine
  modified_base 61: mod_base = OTHER; note = 2'-O-Methyl-cytidine
  modified_base 66: mod_base = OTHER; note = 2'-O-Methyl-uridine
  modified_base 67: mod_base = OTHER; note = 2'-O-Methyl-cytidine
  modified_base 70: mod_base = OTHER; note = 2'-O-Methyl-cytidine
  modified_base 71: mod_base = OTHER; note = 2'-O-Methyl-uridine
  modified_base 72: mod_base = OTHER; note = 2'-O-Methyl-uridine
  modified_base 73: mod_base = OTHER; note = 2'-O-Methyl-guanosine
  modified_base 74: mod_base = OTHER; note = 2'-O-Methyl-adenosine
  modified_base 75: mod_base = OTHER; note = 2'-O-Methyl-adenosine
  modified_base 76: mod_base = OTHER; note = 2'-O-Methyl-adenosine
  modified_base 77: mod_base = OTHER; note = 2'-O-Methyl-adenosine
  modified_base 78: mod_base = OTHER; note = 2'-O-Methyl-adenosine
  modified_base 79: mod_base = OTHER; note = 2'-O-Methyl-guanosine
  modified_base 80: mod_base = OTHER; note = 2'-O-Methyl-uridine
  modified_base 82: mod_base = OTHER; note = 2'-O-Methyl-guanosine
  modified_base 83: mod_base = OTHER; note = 2'-O-Methyl-cytidine
  modified_base 84: mod_base = OTHER; note = 2'-O-Methyl-adenosine
  modified_base 85: mod_base = OTHER; note = 2'-O-Methyl-cytidine
  modified_base 86: mod_base = OTHER; note = 2'-O-Methyl-cytidine
  modified_base 87: mod_base = OTHER; note = 2'-O-Methyl-guanosine
  modified_base 89: mod_base = OTHER; note = 2'-O-Methyl-guanosine
  modified_base 92: mod_base = OTHER; note = 2'-O-Methyl-guanosine
  modified_base 93: mod_base = OTHER; note = 2'-O-Methyl-guanosine
  modified_base 94: mod_base = OTHER; note = 2'-O-Methyl-uridine
  modified_base 95: mod_base = OTHER; note = 2'-O-Methyl-guanosine
  modified_base 96: mod_base = OTHER; note = 2'-O-Methyl-cytidine
  modified_base 97: mod_base = OTHER; note = 2'-O-Methyl-uridine phosphorothioate
  modified_base 98: mod_base = OTHER; note = 2'-O-Methyl-uridine phosphorothioate
  modified_base 99: mod_base = OTHER; note = 2'-O-Methyl-uridine phosphorothioate
  modified_base 100: mod_base = OTHER; note = 2'-O-Methyl-uridine
  misc_difference 101: note = a, c, g, inosine, u, deoxyadenosine, deoxyguanosine, deoxycytidine, deoxyinosine, thymine, ribonebularine, 2'-O-methylnebularine, or 2'-deoxynebularine
  misc_difference 102: note = a, c, g, inosine, u, deoxyadenosine, deoxyguanosine, deoxycytidine, deoxyinosine, thymine, ribonebularine, 2'-O-methylnebularine, or 2'-deoxynebularine
  misc_difference 103: note = a, c, g, inosine, u, deoxyadenosine, deoxyguanosine, deoxycytidine, deoxyinosine, thymine, ribonebularine, 2'-O-methylnebularine, or 2'-deoxynebularine

SEQ ID NO: 2913 - RNA, 103 nt, synthetic construct; identical to SEQ ID NO: 1797
  source 1..103: mol_type = other RNA
  modified_base 1: mod_base = OTHER; note = 2'-O-Methyl-cytidine phosphorothioate
  modified_base 2: mod_base = OTHER; note = 2'-O-Methyl-adenosine phosphorothioate
  modified_base 3: mod_base = OTHER; note = 2'-O-Methyl-guanosine
  modified_base 21: mod_base = OTHER; note = 2'-O-Methyl-guanosine
  modified_base 25: mod_base = OTHER; note = uridine phosphorothioate
  modified_base 28: mod_base = OTHER; note = 2'-O-Methyl-adenosine
  modified_base 29: mod_base = OTHER; note = 2'-O-Methyl-guanosine
  modified_base 30: mod_base = OTHER; note = 2'-O-Methyl-cytidine
  modified_base 31: mod_base = OTHER; note = 2'-O-Methyl-uridine
  modified_base 32: mod_base = OTHER; note = 2'-O-Methyl-adenosine
  modified_base 34: mod_base = OTHER; note = 2'-O-Methyl-adenosine
  modified_base 35: mod_base = OTHER; note = 2'-O-Methyl-adenosine
  modified_base 36: mod_base = OTHER; note = 2'-O-Methyl-adenosine
  modified_base 37: mod_base = OTHER; note = 2'-O-Methyl-uridine
  modified_base 38: mod_base = OTHER; note = 2'-O-Methyl-adenosine
  modified_base 39: mod_base = OTHER; note = 2'-O-Methyl-guanosine
  modified_base 40: mod_base = OTHER; note = 2'-O-Methyl-cytidine
  modified_base 41: mod_base = OTHER; note = 2'-O-Methyl-adenosine
  modified_base 42: mod_base = OTHER; note = 2'-O-Methyl-adenosine
  modified_base 45: mod_base = OTHER; note = uridine phosphorothioate
  modified_base 46: mod_base = OTHER; note = 2'-O-Methyl-adenosine
  modified_base 48: mod_base = OTHER; note = 2'-O-Methyl-adenosine
  modified_base 50: mod_base = OTHER; note = 2'-O-Methyl-uridine
  modified_base 52: mod_base = OTHER; note = 2'-O-Methyl-adenosine
  modified_base 53: mod_base = OTHER; note = 2'-O-Methyl-guanosine
  modified_base 54: mod_base = OTHER; note = 2'-O-Methyl-guanosine
  modified_base 57: mod_base = OTHER; note = 2'-O-Methyl-adenosine
  modified_base 61: mod_base = OTHER; note = 2'-O-Methyl-cytidine
  modified_base 66: mod_base = OTHER; note = 2'-O-Methyl-uridine
  modified_base 67: mod_base = OTHER; note = 2'-O-Methyl-cytidine
  modified_base 70: mod_base = OTHER; note = 2'-O-Methyl-cytidine
  modified_base 71: mod_base = OTHER; note = 2'-O-Methyl-uridine
  modified_base 72: mod_base = OTHER; note = 2'-O-Methyl-uridine
  modified_base 73: mod_base = OTHER; note = 2'-O-Methyl-guanosine
  modified_base 74: mod_base = OTHER; note = 2'-O-Methyl-adenosine
  modified_base 75: mod_base = OTHER; note = 2'-O-Methyl-adenosine
  modified_base 76: mod_base = OTHER; note = 2'-O-Methyl-adenosine
  modified_base 77: mod_base = OTHER; note = 2'-O-Methyl-adenosine
  modified_base 78: mod_base = OTHER; note = 2'-O-Methyl-adenosine
  modified_base 79: mod_base = OTHER; note = 2'-O-Methyl-guanosine
  modified_base 80: mod_base = OTHER; note = 2'-O-Methyl-uridine
  modified_base 82: mod_base = OTHER; note = 2'-O-Methyl-guanosine
  modified_base 83: mod_base = OTHER; note = 2'-O-Methyl-cytidine
  modified_base 84: mod_base = OTHER; note = 2'-O-Methyl-adenosine
  modified_base 85: mod_base = OTHER; note = 2'-O-Methyl-cytidine
  modified_base 86: mod_base = OTHER; note = 2'-O-Methyl-cytidine
  modified_base 87: mod_base = OTHER; note = 2'-O-Methyl-guanosine
  modified_base 89: mod_base = OTHER; note = 2'-O-Methyl-guanosine
  modified_base 91: mod_base = OTHER; note = 2'-O-Methyl-cytidine
  modified_base 92: mod_base = OTHER; note = 2'-O-Methyl-guanosine
  modified_base 93: mod_base = OTHER; note = 2'-O-Methyl-guanosine
  modified_base 94: mod_base = OTHER; note = 2'-O-Methyl-uridine
  modified_base 95: mod_base = OTHER; note = 2'-O-Methyl-guanosine
  modified_base 96: mod_base = OTHER; note = 2'-O-Methyl-cytidine
  modified_base 97: mod_base = OTHER; note = 2'-O-Methyl-uridine phosphorothioate
  modified_base 98: mod_base = OTHER; note = 2'-O-Methyl-uridine phosphorothioate
  modified_base 99: mod_base = OTHER; note = 2'-O-Methyl-uridine phosphorothioate
  modified_base 100: mod_base = OTHER; note = 2'-O-Methyl-uridine
  misc_difference 101: note = a, c, g, inosine, u, deoxyadenosine, deoxyguanosine, deoxycytidine, deoxyinosine, thymine, ribonebularine, 2'-O-methylnebularine, or 2'-deoxynebularine
  misc_difference 102: note = a, c, g, inosine, u, deoxyadenosine, deoxyguanosine, deoxycytidine, deoxyinosine, thymine, ribonebularine, 2'-O-methylnebularine, or 2'-deoxynebularine
  misc_difference 103: note = a, c, g, inosine, u, deoxyadenosine, deoxyguanosine, deoxycytidine, deoxyinosine, thymine, ribonebularine, 2'-O-methylnebularine, or 2'-deoxynebularine

SEQ ID NO: 2914 - RNA, 103 nt, synthetic construct; identical to SEQ ID NO: 1797
  source 1..103: mol_type = other RNA
  modified_base 1: mod_base = OTHER; note = 2'-O-Methyl-cytidine phosphorothioate
  modified_base 2: mod_base = OTHER; note = 2'-O-Methyl-adenosine phosphorothioate
  modified_base 3: mod_base = OTHER; note = 2'-O-Methyl-guanosine
  modified_base 21: mod_base = OTHER; note = 2'-O-Methyl-guanosine
  modified_base 25: mod_base = OTHER; note = uridine phosphorothioate
  modified_base 28: mod_base = OTHER; note = 2'-O-Methyl-adenosine
  modified_base 29: mod_base = OTHER; note = 2'-O-Methyl-guanosine
  modified_base 30: mod_base = OTHER; note = 2'-O-Methyl-cytidine
  modified_base 31: mod_base = OTHER; note = 2'-O-Methyl-uridine
  modified_base 32: mod_base = OTHER; note = 2'-O-Methyl-adenosine
  modified_base 34: mod_base = OTHER; note = 2'-O-Methyl-adenosine
  modified_base 35: mod_base = OTHER; note = 2'-O-Methyl-adenosine
  modified_base 36: mod_base = OTHER; note = 2'-O-Methyl-adenosine
  modified_base 37: mod_base = OTHER; note = 2'-O-Methyl-uridine
  modified_base 38: mod_base = OTHER; note = 2'-O-Methyl-adenosine
  modified_base 39: mod_base = OTHER; note = 2'-O-Methyl-guanosine
  modified_base 40: mod_base = OTHER; note = 2'-O-Methyl-cytidine
  modified_base 41: mod_base = OTHER; note = 2'-O-Methyl-adenosine
  modified_base 42: mod_base = OTHER; note = 2'-O-Methyl-adenosine
  modified_base 45: mod_base = OTHER; note = uridine phosphorothioate
  modified_base 46: mod_base = OTHER; note = 2'-O-Methyl-adenosine
  modified_base 48: mod_base = OTHER; note = 2'-O-Methyl-adenosine
  modified_base 50: mod_base = OTHER; note = 2'-O-Methyl-uridine
  modified_base 52: mod_base = OTHER; note = 2'-O-Methyl-adenosine
  modified_base 53: mod_base = OTHER; note = 2'-O-Methyl-guanosine
  modified_base 54: mod_base = OTHER; note = 2'-O-Methyl-guanosine
  modified_base 55: mod_base = OTHER; note = 2'-O-Methyl-cytidine
  modified_base 56: mod_base = OTHER; note = 2'-O-Methyl-uridine
  modified_base 57: mod_base = OTHER; note = 2'-O-Methyl-adenosine
  modified_base 60: mod_base = OTHER; note = 2'-O-Methyl-cytidine
  modified_base 61: mod_base = OTHER; note = 2'-O-Methyl-cytidine
  modified_base 66: mod_base = OTHER; note = 2'-O-Methyl-uridine
  modified_base 67: mod_base = OTHER; note = 2'-O-Methyl-cytidine
  modified_base 70: mod_base = OTHER; note = 2'-O-Methyl-cytidine
  modified_base 71: mod_base = OTHER; note = 2'-O-Methyl-uridine
  modified_base 72: mod_base = OTHER; note = 2'-O-Methyl-uridine
  modified_base 74: mod_base = OTHER; note = 2'-O-Methyl-adenosine
  modified_base 75: mod_base = OTHER; note = 2'-O-Methyl-adenosine
  modified_base 76: mod_base = OTHER; note = 2'-O-Methyl-adenosine
  modified_base 77: mod_base = OTHER; note = 2'-O-Methyl-adenosine
  modified_base 78: mod_base = OTHER; note = 2'-O-Methyl-adenosine
  modified_base 79: mod_base = OTHER; note = 2'-O-Methyl-guanosine
  modified_base 80: mod_base = OTHER; note = 2'-O-Methyl-uridine
  modified_base 82: mod_base = OTHER; note = 2'-O-Methyl-guanosine
  modified_base 83: mod_base = OTHER; note = 2'-O-Methyl-cytidine
  modified_base 84: mod_base = OTHER; note = 2'-O-Methyl-adenosine
  modified_base 85: mod_base = OTHER; note = 2'-O-Methyl-cytidine
  modified_base 86: mod_base = OTHER; note = 2'-O-Methyl-cytidine
  modified_base 87: mod_base = OTHER; note = 2'-O-Methyl-guanosine
  modified_base 89: mod_base = OTHER; note = 2'-O-Methyl-guanosine
  modified_base 92: mod_base = OTHER; note = 2'-O-Methyl-guanosine
  modified_base 93: mod_base = OTHER; note = 2'-O-Methyl-guanosine
  modified_base 94: mod_base = OTHER; note = 2'-O-Methyl-uridine
  modified_base 95: mod_base = OTHER; note = 2'-O-Methyl-guanosine
  modified_base 96: mod_base = OTHER; note = 2'-O-Methyl-cytidine
  modified_base 97: mod_base = OTHER; note = 2'-O-Methyl-uridine phosphorothioate
  modified_base 98: mod_base = OTHER; note = 2'-O-Methyl-uridine phosphorothioate
  modified_base 99: mod_base = OTHER; note = 2'-O-Methyl-uridine phosphorothioate
  modified_base 100: mod_base = OTHER; note = 2'-O-Methyl-uridine
  misc_difference 101: note = a, c, g, inosine, u, deoxyadenosine, deoxyguanosine, deoxycytidine, deoxyinosine, thymine, ribonebularine, 2'-O-methylnebularine, or 2'-deoxynebularine
  misc_difference 102: note = a, c, g, inosine, u, deoxyadenosine, deoxyguanosine, deoxycytidine, deoxyinosine, thymine, ribonebularine, 2'-O-methylnebularine, or 2'-deoxynebularine
  misc_difference 103: note = a, c, g, inosine, u, deoxyadenosine, deoxyguanosine, deoxycytidine, deoxyinosine, thymine, ribonebularine, 2'-O-methylnebularine, or 2'-deoxynebularine

SEQ ID NO: 2915 - RNA, 103 nt, synthetic construct; identical to SEQ ID NO: 1795
  source 1..103: mol_type = other RNA
  modified_base 1: mod_base = OTHER; note = 2'-O-Methyl-cytidine phosphorothioate
  modified_base 2: mod_base = OTHER; note = 2'-O-Methyl-cytidine phosphorothioate
  modified_base 3: mod_base = OTHER; note = 2'-O-Methyl-cytidine
  modified_base 21: mod_base = OTHER; note = 2'-O-Methyl-guanosine
  modified_base 25: mod_base = OTHER; note = uridine phosphorothioate
  modified_base 28: mod_base = OTHER; note = 2'-O-Methyl-adenosine
  modified_base 29: mod_base = OTHER; note = 2'-O-Methyl-guanosine
  modified_base 30: mod_base = OTHER; note = 2'-O-Methyl-cytidine
  modified_base 31: mod_base = OTHER; note = 2'-O-Methyl-uridine
  modified_base 32: mod_base = OTHER; note = 2'-O-Methyl-adenosine
  modified_base 33: mod_base = OTHER; note = 2'-O-Methyl-guanosine
  modified_base 34: mod_base = OTHER; note = 2'-O-Methyl-adenosine
  modified_base 35: mod_base = OTHER; note = 2'-O-Methyl-adenosine
  modified_base 36: mod_base = OTHER; note = 2'-O-Methyl-adenosine
  modified_base 37: mod_base = OTHER; note = 2'-O-Methyl-uridine
  modified_base 38: mod_base = OTHER; note = 2'-O-Methyl-adenosine
  modified_base 39: mod_base = OTHER; note = 2'-O-Methyl-guanosine
  modified_base 40: mod_base = OTHER; note = 2'-O-Methyl-cytidine
  modified_base 41: mod_base = OTHER; note = 2'-O-Methyl-adenosine
  modified_base 42: mod_base = OTHER; note = 2'-O-Methyl-adenosine
  modified_base 46: mod_base = OTHER; note = 2'-O-Methyl-adenosine
  modified_base 48: mod_base = OTHER; note = 2'-O-Methyl-adenosine
  modified_base 50: mod_base = OTHER; note = 2'-O-Methyl-uridine
  modified_base 52: mod_base = OTHER; note = 2'-O-Methyl-adenosine
  modified_base 53: mod_base = OTHER; note = 2'-O-Methyl-guanosine
  modified_base 54: mod_base = OTHER; note = 2'-O-Methyl-guanosine
  modified_base 55: mod_base = OTHER; note = 2'-O-Methyl-cytidine
  modified_base 56: mod_base = OTHER; note = 2'-O-Methyl-uridine
  modified_base 57: mod_base = OTHER; note = 2'-O-Methyl-adenosine
  modified_base 60: mod_base = OTHER; note = 2'-O-Methyl-cytidine
  modified_base 61: mod_base = OTHER; note = 2'-O-Methyl-cytidine
  modified_base 64: mod_base = OTHER; note = uridine phosphorothioate
  modified_base 66: mod_base = OTHER; note = 2'-O-Methyl-uridine
  modified_base 67: mod_base = OTHER; note = 2'-O-Methyl-cytidine
  modified_base 70: mod_base = OTHER; note = 2'-O-Methyl-cytidine
  modified_base 71: mod_base = OTHER; note = 2'-O-Methyl-uridine
  modified_base 72: mod_base = OTHER; note = 2'-O-Methyl-uridine
  modified_base 73: mod_base = OTHER; note = 2'-O-Methyl-guanosine
  modified_base 74: mod_base = OTHER; note = 2'-O-Methyl-adenosine
  modified_base 75: mod_base = OTHER; note = 2'-O-Methyl-adenosine
  modified_base 76: mod_base = OTHER; note = 2'-O-Methyl-adenosine
  modified_base 77: mod_base = OTHER; note = 2'-O-Methyl-adenosine
  modified_base 78: mod_base = OTHER; note = 2'-O-Methyl-adenosine
  modified_base 79: mod_base = OTHER; note = 2'-O-Methyl-guanosine
  modified_base 80: mod_base = OTHER; note = 2'-O-Methyl-uridine
  modified_base 81: mod_base = OTHER; note = 2'-O-Methyl-guanosine
  modified_base 83: mod_base = OTHER; note = 2'-O-Methyl-cytidine
  modified_base 84: mod_base = OTHER; note = 2'-O-Methyl-adenosine
  modified_base 85: mod_base = OTHER; note = 2'-O-Methyl-cytidine
  modified_base 86: mod_base = OTHER; note = 2'-O-Methyl-cytidine
  modified_base 87: mod_base = OTHER; note = 2'-O-Methyl-guanosine
  modified_base 88: mod_base = OTHER; note = 2'-O-Methyl-adenosine
  modified_base 89: mod_base = OTHER; note = 2'-O-Methyl-guanosine
  modified_base 90: mod_base = OTHER; note = 2'-O-Methyl-uridine
  modified_base 91: mod_base = OTHER; note = 2'-O-Methyl-cytidine
  modified_base 92: mod_base = OTHER; note = 2'-O-Methyl-guanosine
  modified_base 93: mod_base = OTHER; note = 2'-O-Methyl-guanosine
  modified_base 94: mod_base = OTHER; note = 2'-O-Methyl-uridine
  modified_base 95: mod_base = OTHER; note = 2'-O-Methyl-guanosine
  modified_base 96: mod_base = OTHER; note = 2'-O-Methyl-cytidine
  modified_base 97: mod_base = OTHER; note = 2'-O-Methyl-uridine phosphorothioate
  modified_base 98: mod_base = OTHER; note = 2'-O-Methyl-uridine phosphorothioate
  modified_base 99: mod_base = OTHER; note = 2'-O-Methyl-uridine phosphorothioate
  modified_base 100: mod_base = OTHER; note = 2'-O-Methyl-uridine
  misc_difference 101: note = a, c, g, inosine, u, deoxyadenosine, deoxyguanosine, deoxycytidine, deoxyinosine, thymine, ribonebularine, 2'-O-methylnebularine, or 2'-deoxynebularine
  misc_difference 102: note = a, c, g, inosine, u, deoxyadenosine, deoxyguanosine, deoxycytidine, deoxyinosine, thymine, ribonebularine, 2'-O-methylnebularine, or 2'-deoxynebularine
  misc_difference 103: note = a, c, g, inosine, u, deoxyadenosine, deoxyguanosine, deoxycytidine, deoxyinosine, thymine, ribonebularine, 2'-O-methylnebularine, or 2'-deoxynebularine

SEQ ID NO: 2916 - RNA, 103 nt, synthetic construct; identical to SEQ ID NO: 1795
  source 1..103: mol_type = other RNA
  modified_base 1: mod_base = OTHER; note = 2'-O-Methyl-cytidine phosphorothioate
  modified_base 2: mod_base = OTHER; note = 2'-O-Methyl-cytidine phosphorothioate
  modified_base 3: mod_base = OTHER; note = 2'-O-Methyl-cytidine
  modified_base 21: mod_base = OTHER; note = 2'-O-Methyl-guanosine
  modified_base 25: mod_base = OTHER; note = uridine phosphorothioate
  modified_base 28: mod_base = OTHER; note = 2'-O-Methyl-adenosine
  modified_base 29: mod_base = OTHER; note = 2'-O-Methyl-guanosine
  modified_base 30: mod_base = OTHER; note = 2'-O-Methyl-cytidine
  modified_base 31: mod_base = OTHER; note = 2'-O-Methyl-uridine
  modified_base 32: mod_base = OTHER; note = 2'-O-Methyl-adenosine
  modified_base 34: mod_base = OTHER; note = 2'-O-Methyl-adenosine
  modified_base 35: mod_base = OTHER; note = 2'-O-Methyl-adenosine
  modified_base 36: mod_base = OTHER; note = 2'-O-Methyl-adenosine
  modified_base 37: mod_base = OTHER; note = 2'-O-Methyl-uridine
  modified_base 38: mod_base = OTHER; note = 2'-O-Methyl-adenosine
  modified_base 39: mod_base = OTHER; note = 2'-O-Methyl-guanosine
  modified_base 40: mod_base = OTHER; note = 2'-O-Methyl-cytidine
  modified_base 41: mod_base = OTHER; note = 2'-O-Methyl-adenosine
  modified_base 42: mod_base = OTHER; note = 2'-O-Methyl-adenosine
  modified_base 46: mod_base = OTHER; note = 2'-O-Methyl-adenosine
  modified_base 48: mod_base = OTHER; note = 2'-O-Methyl-adenosine
  modified_base 50: mod_base = OTHER; note = 2'-O-Methyl-uridine
  modified_base 52: mod_base = OTHER; note = 2'-O-Methyl-adenosine
  modified_base 53: mod_base = OTHER; note = 2'-O-Methyl-guanosine
  modified_base 54: mod_base = OTHER; note = 2'-O-Methyl-guanosine
  modified_base 55: mod_base = OTHER; note = 2'-O-Methyl-cytidine
  modified_base 56: mod_base = OTHER; note = 2'-O-Methyl-uridine
  modified_base 57: mod_base = OTHER; note = 2'-O-Methyl-adenosine
  modified_base 60: mod_base = OTHER; note = 2'-O-Methyl-cytidine
  modified_base 61: mod_base = OTHER; note = 2'-O-Methyl-cytidine
  modified_base 64: mod_base = OTHER; note = uridine phosphorothioate
  modified_base 66: mod_base = OTHER; note = 2'-O-Methyl-uridine
  modified_base 67: mod_base = OTHER; note = 2'-O-Methyl-cytidine
  modified_base 70: mod_base = OTHER; note = 2'-O-Methyl-cytidine
  modified_base 71: mod_base = OTHER; note = 2'-O-Methyl-uridine
  modified_base 72: mod_base = OTHER; note = 2'-O-Methyl-uridine
  modified_base 74: mod_base = OTHER; note = 2'-O-Methyl-adenosine
  modified_base 75: mod_base = OTHER; note = 2'-O-Methyl-adenosine
  modified_base 76: mod_base = OTHER; note = 2'-O-Methyl-adenosine
  modified_base 77: mod_base = OTHER; note = 2'-O-Methyl-adenosine
  modified_base 78: mod_base = OTHER; note = 2'-O-Methyl-adenosine
  modified_base 79: mod_base = OTHER; note = 2'-O-Methyl-guanosine
  modified_base 80: mod_base = OTHER; note = 2'-O-Methyl-uridine
  modified_base 81: mod_base = OTHER; note = 2'-O-Methyl-guanosine
  modified_base 83: mod_base = OTHER; note = 2'-O-Methyl-cytidine
  modified_base 84: mod_base = OTHER; note = 2'-O-Methyl-adenosine
  modified_base 85: mod_base = OTHER; note = 2'-O-Methyl-cytidine
  modified_base 86: mod_base = OTHER; note = 2'-O-Methyl-cytidine
  modified_base 87: mod_base = OTHER; note = 2'-O-Methyl-guanosine
  modified_base 88: mod_base = OTHER; note = 2'-O-Methyl-adenosine
  modified_base 89: mod_base = OTHER; note = 2'-O-Methyl-guanosine
  modified_base 90: mod_base = OTHER; note = 2'-O-Methyl-uridine
  modified_base 91: mod_base = OTHER; note = 2'-O-Methyl-cytidine
  modified_base 92: mod_base = OTHER; note = 2'-O-Methyl-guanosine
  modified_base 93: mod_base = OTHER; note = 2'-O-Methyl-guanosine
  modified_base 94: mod_base = OTHER; note = 2'-O-Methyl-uridine
  modified_base 95: mod_base = OTHER; note = 2'-O-Methyl-guanosine
  modified_base 96: mod_base = OTHER; note = 2'-O-Methyl-cytidine
  modified_base 97: mod_base = OTHER; note = 2'-O-Methyl-uridine phosphorothioate
  modified_base 98: mod_base = OTHER; note = 2'-O-Methyl-uridine phosphorothioate
  modified_base 99: mod_base = OTHER; note = 2'-O-Methyl-uridine phosphorothioate
  modified_base 100: mod_base = OTHER; note = 2'-O-Methyl-uridine
  misc_difference 101: note = a, c, g, inosine, u, deoxyadenosine, deoxyguanosine, deoxycytidine, deoxyinosine, thymine, ribonebularine, 2'-O-methylnebularine, or 2'-deoxynebularine
  misc_difference 102: note = a, c, g, inosine, u, deoxyadenosine, deoxyguanosine, deoxycytidine, deoxyinosine, thymine, ribonebularine, 2'-O-methylnebularine, or 2'-deoxynebularine
  misc_difference 103: note = a, c, g, inosine, u, deoxyadenosine, deoxyguanosine, deoxycytidine, deoxyinosine, thymine, ribonebularine, 2'-O-methylnebularine, or 2'-deoxynebularine

SEQ ID NO: 2917 - RNA, 103 nt, synthetic construct; identical to SEQ ID NO: 1796
  source 1..103: mol_type = other RNA
  modified_base 1: mod_base = OTHER; note = 2'-O-Methyl-guanosine phosphorothioate
  modified_base 2: mod_base = OTHER; note = 2'-O-Methyl-adenosine phosphorothioate
  modified_base 3: mod_base = OTHER; note = 2'-O-Methyl-guanosine
  modified_base 21: mod_base = OTHER; note = 2'-O-Methyl-guanosine
  modified_base 25: mod_base = OTHER; note = uridine phosphorothioate
  modified_base 28: mod_base = OTHER; note = 2'-O-Methyl-adenosine
  modified_base 29: mod_base = OTHER; note = 2'-O-Methyl-guanosine
  modified_base 30: mod_base = OTHER; note = 2'-O-Methyl-cytidine
  modified_base 31: mod_base = OTHER; note = 2'-O-Methyl-uridine
  modified_base 32: mod_base = OTHER; note = 2'-O-Methyl-adenosine
  modified_base 33: mod_base = OTHER; note = 2'-O-Methyl-guanosine
  modified_base 34: mod_base = OTHER; note = 2'-O-Methyl-adenosine
  modified_base 35: mod_base = OTHER; note = 2'-O-Methyl-adenosine
  modified_base 36: mod_base = OTHER; note = 2'-O-Methyl-adenosine
  modified_base 37: mod_base = OTHER; note = 2'-O-Methyl-uridine
  modified_base 38: mod_base = OTHER; note = 2'-O-Methyl-adenosine
  modified_base 39: mod_base = OTHER; note = 2'-O-Methyl-guanosine
  modified_base 40: mod_base = OTHER; note = 2'-O-Methyl-cytidine
  modified_base 41: mod_base = OTHER; note = 2'-O-Methyl-adenosine
  modified_base 42: mod_base = OTHER; note = 2'-O-Methyl-adenosine
  modified_base 46: mod_base = OTHER; note = 2'-O-Methyl-adenosine
  modified_base 48: mod_base = OTHER; note = 2'-O-Methyl-adenosine
  modified_base 50: mod_base = OTHER; note = 2'-O-Methyl-uridine
  modified_base 52: mod_base = OTHER; note = 2'-O-Methyl-adenosine
  modified_base 53: mod_base = OTHER; note = 2'-O-Methyl-guanosine
  modified_base 54: mod_base = OTHER; note = 2'-O-Methyl-guanosine
  modified_base 55: mod_base = OTHER; note = 2'-O-Methyl-cytidine
  modified_base 56: mod_base = OTHER; note = 2'-O-Methyl-uridine
  modified_base 57: mod_base = OTHER; note = 2'-O-Methyl-adenosine
  modified_base 60: mod_base = OTHER; note = 2'-O-Methyl-cytidine
  modified_base 61: mod_base = OTHER; note = 2'-O-Methyl-cytidine
  modified_base 64: mod_base = OTHER; note = uridine phosphorothioate
  modified_base 66: mod_base = OTHER; note = 2'-O-Methyl-uridine
  modified_base 67: mod_base = OTHER; note = 2'-O-Methyl-cytidine
  modified_base 70: mod_base = OTHER; note = 2'-O-Methyl-cytidine
  modified_base 71: mod_base = OTHER; note = 2'-O-Methyl-uridine
  modified_base 72: mod_base = OTHER; note = 2'-O-Methyl-uridine
  modified_base 73: mod_base = OTHER; note = 2'-O-Methyl-guanosine
  modified_base 74: mod_base = OTHER; note = 2'-O-Methyl-adenosine
  modified_base 75: mod_base = OTHER; note = 2'-O-Methyl-adenosine
  modified_base 76: mod_base = OTHER; note = 2'-O-Methyl-adenosine
  modified_base 77: mod_base = OTHER; note = 2'-O-Methyl-adenosine
  modified_base 78: mod_base = OTHER; note = 2'-O-Methyl-adenosine
  modified_base 79: mod_base = OTHER; note = 2'-O-Methyl-guanosine
  modified_base 80: mod_base = OTHER; note = 2'-O-Methyl-uridine
  modified_base 81: mod_base = OTHER; note = 2'-O-Methyl-guanosine
  modified_base 83: mod_base = OTHER; note = 2'-O-Methyl-cytidine
  modified_base 84: mod_base = OTHER; note = 2'-O-Methyl-adenosine
  modified_base 85: mod_base = OTHER; note = 2'-O-Methyl-cytidine
  modified_base 86: mod_base = OTHER; note = 2'-O-Methyl-cytidine
  modified_base 87: mod_base = OTHER; note = 2'-O-Methyl-guanosine
  modified_base 88: mod_base = OTHER; note = 2'-O-Methyl-adenosine
  modified_base 89: mod_base = OTHER; note = 2'-O-Methyl-guanosine
  modified_base 90: mod_base = OTHER; note = 2'-O-Methyl-uridine
  modified_base 91: mod_base = OTHER; note = 2'-O-Methyl-cytidine
  modified_base 92: mod_base = OTHER; note = 2'-O-Methyl-guanosine
  modified_base 93: mod_base = OTHER; note = 2'-O-Methyl-guanosine
  modified_base 94: mod_base = OTHER; note = 2'-O-Methyl-uridine
  modified_base 95: mod_base = OTHER; note = 2'-O-Methyl-guanosine
  modified_base 96: mod_base = OTHER; note = 2'-O-Methyl-cytidine
  modified_base 97: mod_base = OTHER; note = 2'-O-Methyl-uridine phosphorothioate
  modified_base 98: mod_base = OTHER; note = 2'-O-Methyl-uridine phosphorothioate
  modified_base 99: mod_base = OTHER; note = 2'-O-Methyl-uridine phosphorothioate
  modified_base 100: mod_base = OTHER; note = 2'-O-Methyl-uridine
  misc_difference 101: note = a, c, g, inosine, u, deoxyadenosine, deoxyguanosine, deoxycytidine, deoxyinosine, thymine, ribonebularine, 2'-O-methylnebularine, or 2'-deoxynebularine
  misc_difference 102: note = a, c, g, inosine, u, deoxyadenosine, deoxyguanosine, deoxycytidine, deoxyinosine, thymine, ribonebularine, 2'-O-methylnebularine, or 2'-deoxynebularine
  misc_difference 103: note = a, c, g, inosine, u, deoxyadenosine, deoxyguanosine, deoxycytidine, deoxyinosine, thymine, ribonebularine, 2'-O-methylnebularine, or 2'-deoxynebularine

SEQ ID NO: 2918 - RNA, 103 nt, synthetic construct; identical to SEQ ID NO: 1796
  source 1..103: mol_type = other RNA
  modified_base 1: mod_base = OTHER; note = 2'-O-Methyl-guanosine phosphorothioate
  modified_base 2: mod_base = OTHER; note = 2'-O-Methyl-adenosine phosphorothioate
  modified_base 3: mod_base = OTHER; note = 2'-O-Methyl-guanosine
  modified_base 21: mod_base = OTHER; note = 2'-O-Methyl-guanosine
  modified_base 25: mod_base = OTHER; note = uridine phosphorothioate
  modified_base 28: mod_base = OTHER; note = 2'-O-Methyl-adenosine
  modified_base 29: mod_base = OTHER; note = 2'-O-Methyl-guanosine
  modified_base 30: mod_base = OTHER; note = 2'-O-Methyl-cytidine
  modified_base 31: mod_base = OTHER; note = 2'-O-Methyl-uridine
  modified_base 32: mod_base = OTHER; note = 2'-O-Methyl-adenosine
  modified_base 34: mod_base = OTHER; note = 2'-O-Methyl-adenosine
  modified_base 35: mod_base = OTHER; note = 2'-O-Methyl-adenosine
  modified_base 36: mod_base = OTHER; note = 2'-O-Methyl-adenosine
  modified_base 37: mod_base = OTHER; note = 2'-O-Methyl-uridine
  modified_base 38: mod_base = OTHER; note = 2'-O-Methyl-adenosine
  modified_base 39: mod_base = OTHER; note = 2'-O-Methyl-guanosine
  modified_base 40: mod_base = OTHER; note = 2'-O-Methyl-cytidine
  modified_base 41: mod_base = OTHER; note = 2'-O-Methyl-adenosine
  modified_base 42: mod_base = OTHER; note = 2'-O-Methyl-adenosine
  modified_base 46: mod_base = OTHER; note = 2'-O-Methyl-adenosine
  modified_base 48: mod_base = OTHER; note = 2'-O-Methyl-adenosine
  modified_base 50: mod_base = OTHER; note = 2'-O-Methyl-uridine
  modified_base 52: mod_base = OTHER; note = 2'-O-Methyl-adenosine
  modified_base 53: mod_base = OTHER; note = 2'-O-Methyl-guanosine
  modified_base 54: mod_base = OTHER; note = 2'-O-Methyl-guanosine
  modified_base 55: mod_base = OTHER; note = 2'-O-Methyl-cytidine
  modified_base 56: mod_base = OTHER; note = 2'-O-Methyl-uridine
  modified_base 57: mod_base = OTHER; note = 2'-O-Methyl-adenosine
  modified_base 60: mod_base = OTHER; note = 2'-O-Methyl-cytidine
  modified_base 61: mod_base = OTHER; note = 2'-O-Methyl-cytidine
  modified_base 64: mod_base = OTHER; note = uridine phosphorothioate
  modified_base 66: mod_base = OTHER; note = 2'-O-Methyl-uridine
  modified_base 67: mod_base = OTHER; note = 2'-O-Methyl-cytidine
  modified_base 70: mod_base = OTHER; note = 2'-O-Methyl-cytidine
  modified_base 71: mod_base = OTHER; note = 2'-O-Methyl-uridine
  modified_base 72: mod_base = OTHER; note = 2'-O-Methyl-uridine
  modified_base 74: mod_base = OTHER; note = 2'-O-Methyl-adenosine
  modified_base 75: mod_base = OTHER; note = 2'-O-Methyl-adenosine
  modified_base 76: mod_base = OTHER; note = 2'-O-Methyl-adenosine
  modified_base 77: mod_base = OTHER; note = 2'-O-Methyl-adenosine
  modified_base 78: mod_base = OTHER; note = 2'-O-Methyl-adenosine
  modified_base 79: mod_base = OTHER; note = 2'-O-Methyl-guanosine
  modified_base 80: mod_base = OTHER; note = 2'-O-Methyl-uridine
  modified_base 81: mod_base = OTHER; note = 2'-O-Methyl-guanosine
  modified_base 83: mod_base = OTHER; note = 2'-O-Methyl-cytidine
  modified_base 84: mod_base = OTHER; note = 2'-O-Methyl-adenosine
  modified_base 85: mod_base = OTHER; note = 2'-O-Methyl-cytidine
  modified_base 86: mod_base = OTHER; note = 2'-O-Methyl-cytidine
  modified_base 87: mod_base = OTHER; note = 2'-O-Methyl-guanosine
  modified_base 88: mod_base = OTHER; note = 2'-O-Methyl-adenosine
  modified_base 89: mod_base = OTHER; note = 2'-O-Methyl-guanosine
  modified_base 90: mod_base = OTHER; note = 2'-O-Methyl-uridine
  modified_base 91: mod_base = OTHER; note = 2'-O-Methyl-cytidine
  modified_base 92: mod_base = OTHER; note = 2'-O-Methyl-guanosine
  modified_base 93: mod_base = OTHER; note = 2'-O-Methyl-guanosine
  modified_base 94: mod_base = OTHER; note = 2'-O-Methyl-uridine
  modified_base 95: mod_base = OTHER; note = 2'-O-Methyl-guanosine
  modified_base 96: mod_base = OTHER; note = 2'-O-Methyl-cytidine
  modified_base 97: mod_base = OTHER; note = 2'-O-Methyl-uridine phosphorothioate
  modified_base 98: mod_base = OTHER; note = 2'-O-Methyl-uridine phosphorothioate
  modified_base 99: mod_base = OTHER; note = 2'-O-Methyl-uridine phosphorothioate
  modified_base 100: mod_base = OTHER; note = 2'-O-Methyl-uridine
  misc_difference 101: note = a, c, g, inosine, u, deoxyadenosine, deoxyguanosine, deoxycytidine, deoxyinosine, thymine, ribonebularine, 2'-O-methylnebularine, or 2'-deoxynebularine
  misc_difference 102: note = a, c, g, inosine, u, deoxyadenosine, deoxyguanosine, deoxycytidine, deoxyinosine, thymine, ribonebularine, 2'-O-methylnebularine, or 2'-deoxynebularine
  misc_difference 103: note = a, c, g, inosine, u, deoxyadenosine, deoxyguanosine, deoxycytidine, deoxyinosine, thymine, ribonebularine, 2'-O-methylnebularine, or 2'-deoxynebularine

SEQ ID NO: 2919 - RNA, 103 nt, synthetic construct; identical to SEQ ID NO: 1797
  source 1..103: mol_type = other RNA
  modified_base 1: mod_base = OTHER; note = 2'-O-Methyl-cytidine phosphorothioate
  modified_base 2: mod_base = OTHER; note = 2'-O-Methyl-adenosine phosphorothioate
  modified_base 3: mod_base = OTHER; note = 2'-O-Methyl-guanosine
  modified_base 21: mod_base = OTHER; note = 2'-O-Methyl-guanosine
  modified_base 25: mod_base = OTHER; note = uridine phosphorothioate
  modified_base 28: mod_base = OTHER; note = 2'-O-Methyl-adenosine
  modified_base 29: mod_base = OTHER; note = 2'-O-Methyl-guanosine
  modified_base 30: mod_base = OTHER; note = 2'-O-Methyl-cytidine
  modified_base 31: mod_base = OTHER; note = 2'-O-Methyl-uridine
  modified_base 32: mod_base = OTHER; note = 2'-O-Methyl-adenosine
  modified_base 33: mod_base = OTHER; note = 2'-O-Methyl-guanosine
  modified_base 34: mod_base = OTHER; note = 2'-O-Methyl-adenosine
  modified_base 35: mod_base = OTHER; note = 2'-O-Methyl-adenosine
  modified_base 36: mod_base = OTHER; note = 2'-O-Methyl-adenosine
  modified_base 37: mod_base = OTHER; note = 2'-O-Methyl-uridine
  modified_base 38: mod_base = OTHER; note = 2'-O-Methyl-adenosine
  modified_base 39: mod_base = OTHER; note = 2'-O-Methyl-guanosine
  modified_base 40: mod_base = OTHER; note = 2'-O-Methyl-cytidine
  modified_base 41: mod_base = OTHER; note = 2'-O-Methyl-adenosine
  modified_base 42: mod_base = OTHER; note = 2'-O-Methyl-adenosine
  modified_base 46: mod_base = OTHER; note = 2'-O-Methyl-adenosine
  modified_base 48: mod_base = OTHER; note = 2'-O-Methyl-adenosine
  modified_base 50: mod_base = OTHER; note = 2'-O-Methyl-uridine
  modified_base 52: mod_base = OTHER; note = 2'-O-Methyl-adenosine
  modified_base 53: mod_base = OTHER; note = 2'-O-Methyl-guanosine
  modified_base 54: mod_base = OTHER; note = 2'-O-Methyl-guanosine
  modified_base 57: mod_base = OTHER; note = 2'-O-Methyl-adenosine
  modified_base 61: mod_base = OTHER; note = 2'-O-Methyl-cytidine
  modified_base 64: mod_base = OTHER; note = uridine phosphorothioate
  modified_base 66: mod_base = OTHER; note = 2'-O-Methyl-uridine
  modified_base 67: mod_base = OTHER; note = 2'-O-Methyl-cytidine
  modified_base 70: mod_base = OTHER; note = 2'-O-Methyl-cytidine
  modified_base 71: mod_base = OTHER; note = 2'-O-Methyl-uridine
  modified_base 72: mod_base = OTHER; note = 2'-O-Methyl-uridine
  modified_base 74: mod_base = OTHER; note = 2'-O-Methyl-adenosine
  modified_base 75: mod_base = OTHER; note = 2'-O-Methyl-adenosine
  modified_base 76: mod_base = OTHER; note = 2'-O-Methyl-adenosine
  modified_base 77: mod_base = OTHER; note = 2'-O-Methyl-adenosine
  modified_base 78: mod_base = OTHER; note = 2'-O-Methyl-adenosine
  modified_base 79: mod_base = OTHER; note = 2'-O-Methyl-guanosine
  modified_base 80: mod_base = OTHER; note = 2'-O-Methyl-uridine
  modified_base 82: mod_base = OTHER; note = 2'-O-Methyl-guanosine
  modified_base 83: mod_base = OTHER; note = 2'-O-Methyl-cytidine
  modified_base 84: mod_base = OTHER; note = 2'-O-Methyl-adenosine
  modified_base 85: mod_base = OTHER; note = 2'-O-Methyl-cytidine
  modified_base 86: mod_base = OTHER; note = 2'-O-Methyl-cytidine
  modified_base 87: mod_base = OTHER; note = 2'-O-Methyl-guanosine
  modified_base 89: mod_base = OTHER; note = 2'-O-Methyl-guanosine
  modified_base 92: mod_base = OTHER; note = 2'-O-Methyl-guanosine
  modified_base 93: mod_base = OTHER; note = 2'-O-Methyl-guanosine
  modified_base 94: mod_base = OTHER; note = 2'-O-Methyl-uridine
  modified_base 95: mod_base = OTHER; note = 2'-O-Methyl-guanosine
  modified_base 96: mod_base = OTHER; note = 2'-O-Methyl-cytidine
  modified_base 97: mod_base = OTHER; note = 2'-O-Methyl-uridine phosphorothioate
  modified_base 98: mod_base = OTHER; note = 2'-O-Methyl-uridine phosphorothioate
  modified_base 99: mod_base = OTHER; note = 2'-O-Methyl-uridine phosphorothioate
  modified_base 100: mod_base = OTHER; note = 2'-O-Methyl-uridine
  misc_difference 101: note = a, c, g, inosine, u, deoxyadenosine, deoxyguanosine, deoxycytidine, deoxyinosine, thymine, ribonebularine, 2'-O-methylnebularine, or 2'-deoxynebularine
  misc_difference 102: note = a, c, g, inosine, u, deoxyadenosine, deoxyguanosine, deoxycytidine, deoxyinosine, thymine, ribonebularine, 2'-O-methylnebularine, or 2'-deoxynebularine
  misc_difference 103: note = a, c, g, inosine, u, deoxyadenosine, deoxyguanosine, deoxycytidine, deoxyinosine, thymine, ribonebularine, 2'-O-methylnebularine, or 2'-deoxynebularine

SEQ ID NO: 2920 - RNA, 103 nt, synthetic construct; identical to SEQ ID NO: 1797
  source 1..103: mol_type = other RNA
  modified_base 1: mod_base = OTHER; note = 2'-O-Methyl-cytidine phosphorothioate
  modified_base 2: mod_base = OTHER; note = 2'-O-Methyl-adenosine phosphorothioate
  modified_base 3: mod_base = OTHER; note = 2'-O-Methyl-guanosine
  modified_base 21: mod_base = OTHER; note = 2'-O-Methyl-guanosine
  modified_base 25: mod_base = OTHER; note = uridine phosphorothioate
  modified_base 28: mod_base = OTHER; note = 2'-O-Methyl-adenosine
  modified_base 29: mod_base = OTHER; note = 2'-O-Methyl-guanosine
  modified_base 30: mod_base = OTHER; note = 2'-O-Methyl-cytidine
  modified_base 31: mod_base = OTHER; note = 2'-O-Methyl-uridine
  modified_base 32: mod_base = OTHER; note = 2'-O-Methyl-adenosine
  modified_base 33: mod_base = OTHER; note = 2'-O-Methyl-guanosine
  modified_base 34: mod_base = OTHER; note = 2'-O-Methyl-adenosine
  modified_base 35: mod_base = OTHER; note = 2'-O-Methyl-adenosine
  modified_base 36: mod_base = OTHER; note = 2'-O-Methyl-adenosine
  modified_base 37: mod_base = OTHER; note = 2'-O-Methyl-uridine
  modified_base 38: mod_base = OTHER; note = 2'-O-Methyl-adenosine
  modified_base 39: mod_base = OTHER; note = 2'-O-Methyl-guanosine
  modified_base 40: mod_base = OTHER; note = 2'-O-Methyl-cytidine
  modified_base 41: mod_base = OTHER; note = 2'-O-Methyl-adenosine
  modified_base 42: mod_base = OTHER; note = 2'-O-Methyl-adenosine
  modified_base 46: mod_base = OTHER; note = 2'-O-Methyl-adenosine
  modified_base 48: mod_base = OTHER; note = 2'-O-Methyl-adenosine
  modified_base 50: mod_base = OTHER; note = 2'-O-Methyl-uridine
  modified_base 52: mod_base = OTHER; note = 2'-O-Methyl-adenosine
  modified_base 53: mod_base = OTHER; note = 2'-O-Methyl-guanosine
  modified_base 54: mod_base = OTHER; note = 2'-O-Methyl-guanosine
  modified_base 55: mod_base = OTHER; note = 2'-O-Methyl-cytidine
  modified_base 56: mod_base = OTHER; note = 2'-O-Methyl-uridine
  modified_base 57: mod_base = OTHER; note = 2'-O-Methyl-adenosine
  modified_base 60: mod_base = OTHER; note = 2'-O-Methyl-cytidine
  modified_base 61: mod_base = OTHER; note = 2'-O-Methyl-cytidine
  modified_base 64: mod_base = OTHER; note = uridine phosphorothioate
  modified_base 66: mod_base = OTHER; note = 2'-O-Methyl-uridine
  modified_base 67: mod_base = OTHER; note = 2'-O-Methyl-cytidine
  modified_base 70: mod_base = OTHER; note = 2'-O-Methyl-cytidine
  modified_base 71: mod_base = OTHER; note = 2'-O-Methyl-uridine
  modified_base 72: mod_base = OTHER; note = 2'-O-Methyl-uridine
  modified_base 74: mod_base = OTHER; note = 2'-O-Methyl-adenosine
  modified_base 75: mod_base = OTHER; note = 2'-O-Methyl-adenosine
  modified_base 76: mod_base = OTHER; note = 2'-O-Methyl-adenosine
  modified_base 77: mod_base = OTHER; note = 2'-O-Methyl-adenosine
  modified_base 78: mod_base = OTHER; note = 2'-O-Methyl-adenosine
  modified_base 79: mod_base = OTHER; note = 2'-O-Methyl-guanosine
  modified_base 80: mod_base = OTHER; note = 2'-O-Methyl-uridine
  modified_base 82: mod_base = OTHER; note = 2'-O-Methyl-guanosine
  modified_base 83: mod_base = OTHER; note = 2'-O-Methyl-cytidine
  modified_base 84: mod_base = OTHER; note = 2'-O-Methyl-adenosine
  modified_base 85: mod_base = OTHER; note = 2'-O-Methyl-cytidine
  modified_base 86: mod_base = OTHER; note = 2'-O-Methyl-cytidine
  modified_base 87: mod_base = OTHER; note = 2'-O-Methyl-guanosine
  modified_base 89: mod_base = OTHER; note = 2'-O-Methyl-guanosine
  modified_base 92: mod_base = OTHER; note = 2'-O-Methyl-guanosine
  modified_base 93: mod_base = OTHER; note = 2'-O-Methyl-guanosine
  modified_base 94: mod_base = OTHER; note = 2'-O-Methyl-uridine
  modified_base 95: mod_base = OTHER; note = 2'-O-Methyl-guanosine
  modified_base 96: mod_base = OTHER; note = 2'-O-Methyl-cytidine
  modified_base 97: mod_base = OTHER; note = 2'-O-Methyl-uridine phosphorothioate
  modified_base 98: mod_base = OTHER; note = 2'-O-Methyl-uridine phosphorothioate
  modified_base 99: mod_base = OTHER; note = 2'-O-Methyl-uridine phosphorothioate
  modified_base 100: mod_base = OTHER; note = 2'-O-Methyl-uridine
  misc_difference 101: note = a, c, g, inosine, u, deoxyadenosine, deoxyguanosine, deoxycytidine, deoxyinosine, thymine, ribonebularine, 2'-O-methylnebularine, or 2'-deoxynebularine
  misc_difference 102: note = a, c, g, inosine, u, deoxyadenosine, deoxyguanosine, deoxycytidine, deoxyinosine, thymine, ribonebularine, 2'-O-methylnebularine, or 2'-deoxynebularine
  misc_difference 103: note = a, c, g, inosine, u, deoxyadenosine, deoxyguanosine, deoxycytidine, deoxyinosine, thymine, ribonebularine, 2'-O-methylnebularine, or 2'-deoxynebularine

SEQ ID NO: 2921 - RNA, 103 nt, synthetic construct; identical to SEQ ID NO: 1797
  source 1..103: mol_type = other RNA
  modified_base 1: mod_base = OTHER; note = 2'-O-Methyl-cytidine phosphorothioate
  modified_base 2: mod_base = OTHER; note = 2'-O-Methyl-adenosine phosphorothioate
  modified_base 3: mod_base = OTHER; note = 2'-O-Methyl-guanosine
  modified_base 21: mod_base = OTHER; note = 2'-O-Methyl-guanosine
  modified_base 25: mod_base = OTHER; note = uridine phosphorothioate
  modified_base 28: mod_base = OTHER; note = 2'-O-Methyl-adenosine
  modified_base 29: mod_base = OTHER; note = 2'-O-Methyl-guanosine
  modified_base 30: mod_base = OTHER; note = 2'-O-Methyl-cytidine
  modified_base 31: mod_base = OTHER; note = 2'-O-Methyl-uridine
  modified_base 32: mod_base = OTHER; note = 2'-O-Methyl-adenosine
  modified_base 33: mod_base = OTHER; note = 2'-O-Methyl-guanosine
  modified_base 34: mod_base = OTHER; note = 2'-O-Methyl-adenosine
  modified_base 35: mod_base = OTHER; note = 2'-O-Methyl-adenosine
  modified_base 36: mod_base = OTHER; note = 2'-O-Methyl-adenosine
  modified_base 37: mod_base = OTHER; note = 2'-O-Methyl-uridine
  modified_base 38: mod_base = OTHER; note = 2'-O-Methyl-adenosine
  modified_base 39: mod_base = OTHER; note = 2'-O-Methyl-guanosine
  modified_base 40: mod_base = OTHER; note = 2'-O-Methyl-cytidine
  modified_base 41: mod_base = OTHER; note = 2'-O-Methyl-adenosine
  modified_base 42: mod_base = OTHER; note = 2'-O-Methyl-adenosine
  modified_base 46: mod_base = OTHER; note = 2'-O-Methyl-adenosine
  modified_base 48: mod_base = OTHER; note = 2'-O-Methyl-adenosine
  modified_base 50: mod_base = OTHER; note = 2'-O-Methyl-uridine
  modified_base 52: mod_base = OTHER; note = 2'-O-Methyl-adenosine
  modified_base 53: mod_base = OTHER; note = 2'-O-Methyl-guanosine
  modified_base 54: mod_base = OTHER; note = 2'-O-Methyl-guanosine
  modified_base 57: mod_base = OTHER; note = 2'-O-Methyl-adenosine
  modified_base 61: mod_base = OTHER; note = 2'-O-Methyl-cytidine
  modified_base 64: mod_base = OTHER; note = uridine phosphorothioate
  modified_base 66: mod_base = OTHER; note = 2'-O-Methyl-uridine
  modified_base 67: mod_base = OTHER; note = 2'-O-Methyl-cytidine
  modified_base 70: mod_base = OTHER; note = 2'-O-Methyl-cytidine
  modified_base 71: mod_base = OTHER; note = 2'-O-Methyl-uridine
  modified_base 72: mod_base = OTHER; note = 2'-O-Methyl-uridine
  modified_base 73: mod_base = OTHER; note = 2'-O-Methyl-guanosine
  modified_base 74: mod_base = OTHER; note = 2'-O-Methyl-adenosine
  modified_base 75: mod_base = OTHER; note = 2'-O-Methyl-adenosine
  modified_base 76: mod_base = OTHER; note = 2'-O-Methyl-adenosine
  modified_base 77: mod_base = OTHER; note = 2'-O-Methyl-adenosine
  modified_base 78: mod_base = OTHER; note = 2'-O-Methyl-adenosine
  modified_base 79: mod_base = OTHER; note = 2'-O-Methyl-guanosine
  modified_base 80: mod_base = OTHER; note = 2'-O-Methyl-uridine
  modified_base 82: mod_base = OTHER; note = 2'-O-Methyl-guanosine
  modified_base 83: mod_base = OTHER; note = 2'-O-Methyl-cytidine
  modified_base 84: mod_base = OTHER; note = 2'-O-Methyl-adenosine
  modified_base 85: mod_base = OTHER; note = 2'-O-Methyl-cytidine
  modified_base 86: mod_base = OTHER; note = 2'-O-Methyl-cytidine
  modified_base 87: mod_base = OTHER; note = 2'-O-Methyl-guanosine
  modified_base 89: mod_base = OTHER; note = 2'-O-Methyl-guanosine
  modified_base 92: mod_base = OTHER; note = 2'-O-Methyl-guanosine
  modified_base 93: mod_base = OTHER; note = 2'-O-Methyl-guanosine
  modified_base 94: mod_base = OTHER; note = 2'-O-Methyl-uridine
  modified_base 95: mod_base = OTHER; note = 2'-O-Methyl-guanosine
  modified_base 96: mod_base = OTHER; note = 2'-O-Methyl-cytidine
  modified_base 97: mod_base = OTHER; note = 2'-O-Methyl-uridine phosphorothioate
  modified_base 98: mod_base = OTHER; note = 2'-O-Methyl-uridine phosphorothioate
  modified_base 99: mod_base = OTHER; note = 2'-O-Methyl-uridine phosphorothioate
  modified_base 100: mod_base = OTHER; note = 2'-O-Methyl-uridine
  misc_difference 101: note = a, c, g, inosine, u, deoxyadenosine, deoxyguanosine, deoxycytidine, deoxyinosine, thymine, ribonebularine, 2'-O-methylnebularine, or 2'-deoxynebularine
  misc_difference 102: note = a, c, g, inosine, u, deoxyadenosine, deoxyguanosine, deoxycytidine, deoxyinosine, thymine, ribonebularine, 2'-O-methylnebularine, or 2'-deoxynebularine
  misc_difference 103: note = a, c, g, inosine, u, deoxyadenosine, deoxyguanosine, deoxycytidine, deoxyinosine, thymine, ribonebularine, 2'-O-methylnebularine, or 2'-deoxynebularine

SEQ ID NO: 2922 - RNA, 103 nt, synthetic construct; identical to SEQ ID NO: 1797
  source 1..103: mol_type = other RNA
  modified_base 1: mod_base = OTHER; note = 2'-O-Methyl-cytidine phosphorothioate
  modified_base 2: mod_base = OTHER; note = 2'-O-Methyl-adenosine phosphorothioate
  modified_base 3: mod_base = OTHER; note = 2'-O-Methyl-guanosine
  modified_base 21: mod_base = OTHER; note = 2'-O-Methyl-guanosine
  modified_base 25: mod_base = OTHER; note = uridine phosphorothioate
  modified_base 28: mod_base = OTHER; note = 2'-O-Methyl-adenosine
  modified_base 29: mod_base = OTHER; note = 2'-O-Methyl-guanosine
  modified_base 30: mod_base = OTHER; note = 2'-O-Methyl-cytidine
  modified_base 31: mod_base = OTHER; note = 2'-O-Methyl-uridine
  modified_base 32: mod_base = OTHER; note = 2'-O-Methyl-adenosine
  modified_base 33: mod_base = OTHER; note = 2'-O-Methyl-guanosine
  modified_base 34: mod_base = OTHER; note = 2'-O-Methyl-adenosine
  modified_base 35: mod_base = OTHER; note = 2'-O-Methyl-adenosine
  modified_base 36: mod_base = OTHER; note = 2'-O-Methyl-adenosine
  modified_base 37: mod_base = OTHER; note = 2'-O-Methyl-uridine
  modified_base 38: mod_base = OTHER; note = 2'-O-Methyl-adenosine
  modified_base 39: mod_base = OTHER; note = 2'-O-Methyl-guanosine
  modified_base 40: mod_base = OTHER; note = 2'-O-Methyl-cytidine
  modified_base 41: mod_base = OTHER; note = 2'-O-Methyl-adenosine
  modified_base 42: mod_base = OTHER; note = 2'-O-Methyl-adenosine
  modified_base 46: mod_base = OTHER; note = 2'-O-Methyl-adenosine
  modified_base 48: mod_base = OTHER; note = 2'-O-Methyl-adenosine
  modified_base 50: mod_base = OTHER; note = 2'-O-Methyl-uridine
  modified_base 52: mod_base = OTHER; note = 2'-O-Methyl-adenosine
  modified_base 53: mod_base = OTHER; note = 2'-O-Methyl-guanosine
  modified_base 54: mod_base = OTHER; note = 2'-O-Methyl-guanosine
  modified_base 57: mod_base = OTHER; note = 2'-O-Methyl-adenosine
  modified_base 61: mod_base = OTHER; note = 2'-O-Methyl-cytidine
  modified_base 64: mod_base = OTHER; note = uridine phosphorothioate
  modified_base 66: mod_base = OTHER; note = 2'-O-Methyl-uridine
  modified_base 67: mod_base = OTHER; note = 2'-O-Methyl-cytidine
  modified_base 70: mod_base = OTHER; note = 2'-O-Methyl-cytidine
  modified_base 71: mod_base = OTHER; note = 2'-O-Methyl-uridine
  modified_base 72: mod_base = OTHER; note = 2'-O-Methyl-uridine
  modified_base 73: mod_base = OTHER; note = 2'-O-Methyl-guanosine
  modified_base 74: mod_base = OTHER; note = 2'-O-Methyl-adenosine
  modified_base 75: mod_base = OTHER; note = 2'-O-Methyl-adenosine
  modified_base 76: mod_base = OTHER; note = 2'-O-Methyl-adenosine
  modified_base 77: mod_base = OTHER; note = 2'-O-Methyl-adenosine
  modified_base 78: mod_base = OTHER; note = 2'-O-Methyl-adenosine
  modified_base 79: mod_base = OTHER; note = 2'-O-Methyl-guanosine
  modified_base 80: mod_base = OTHER; note = 2'-O-Methyl-uridine
  modified_base 82: mod_base = OTHER; note = 2'-O-Methyl-guanosine
  modified_base 83: mod_base = OTHER; note = 2'-O-Methyl-cytidine
  modified_base 84: mod_base = OTHER; note = 2'-O-Methyl-adenosine
  modified_base 85: mod_base = OTHER; note = 2'-O-Methyl-cytidine
  modified_base 86: mod_base = OTHER; note = 2'-O-Methyl-cytidine
  modified_base 87: mod_base = OTHER; note = 2'-O-Methyl-guanosine
  modified_base 89: mod_base = OTHER; note = 2'-O-Methyl-guanosine
  modified_base 91: mod_base = OTHER; note = 2'-O-Methyl-cytidine
  modified_base 92: mod_base = OTHER; note = 2'-O-Methyl-guanosine
  modified_base 93: mod_base = OTHER; note = 2'-O-Methyl-guanosine
  modified_base 94: mod_base = OTHER; note = 2'-O-Methyl-uridine
  modified_base 95: mod_base = OTHER; note = 2'-O-Methyl-guanosine
  modified_base 96: mod_base = OTHER; note = 2'-O-Methyl-cytidine
  modified_base 97: mod_base = OTHER; note = 2'-O-Methyl-uridine phosphorothioate
  modified_base 98: mod_base = OTHER; note = 2'-O-Methyl-uridine phosphorothioate
  modified_base 99: mod_base = OTHER; note = 2'-O-Methyl-uridine phosphorothioate
  modified_base 100: mod_base = OTHER; note = 2'-O-Methyl-uridine
  misc_difference 101: note = a, c, g, inosine, u, deoxyadenosine, deoxyguanosine, deoxycytidine, deoxyinosine, thymine, ribonebularine, 2'-O-methylnebularine, or 2'-deoxynebularine
  misc_difference 102: note = a, c, g, inosine, u, deoxyadenosine, deoxyguanosine, deoxycytidine, deoxyinosine, thymine, ribonebularine, 2'-O-methylnebularine, or 2'-deoxynebularine
  misc_difference 103: note = a, c, g, inosine, u, deoxyadenosine, deoxyguanosine, deoxycytidine, deoxyinosine, thymine, ribonebularine, 2'-O-methylnebularine, or 2'-deoxynebularine

SEQ ID NO: 2923 - RNA, 103 nt, synthetic construct; identical to SEQ ID NO: 1797
  source 1..103: mol_type = other RNA
  modified_base 1: mod_base = OTHER; note = 2'-O-Methyl-cytidine phosphorothioate
  modified_base 2: mod_base = OTHER; note = 2'-O-Methyl-adenosine phosphorothioate
  modified_base 3: mod_base = OTHER; note = 2'-O-Methyl-guanosine
  modified_base 21: mod_base = OTHER; note = 2'-O-Methyl-guanosine
  modified_base 25: mod_base = OTHER; note = uridine phosphorothioate
  modified_base 28: mod_base = OTHER; note = 2'-O-Methyl-adenosine
  modified_base 29: mod_base = OTHER; note = 2'-O-Methyl-guanosine
  modified_base 30: mod_base = OTHER; note = 2'-O-Methyl-cytidine
  modified_base 31: mod_base = OTHER; note = 2'-O-Methyl-uridine
  modified_base 32: mod_base = OTHER; note = 2'-O-Methyl-adenosine
  modified_base 34: mod_base = OTHER; note = 2'-O-Methyl-adenosine
  modified_base 35: mod_base = OTHER; note = 2'-O-Methyl-adenosine
  modified_base 36: mod_base = OTHER; note = 2'-O-Methyl-adenosine
  modified_base 37: mod_base = OTHER; note = 2'-O-Methyl-uridine
  modified_base 38: mod_base = OTHER; note = 2'-O-Methyl-adenosine
  modified_base 39: mod_base = OTHER; note = 2'-O-Methyl-guanosine
  modified_base 40: mod_base = OTHER; note = 2'-O-Methyl-cytidine
  modified_base 41: mod_base = OTHER; note = 2'-O-Methyl-adenosine
  modified_base 42: mod_base = OTHER; note = 2'-O-Methyl-adenosine
  modified_base 46: mod_base = OTHER; note = 2'-O-Methyl-adenosine
  modified_base 48: mod_base = OTHER; note = 2'-O-Methyl-adenosine
  modified_base 50: mod_base = OTHER; note = 2'-O-Methyl-uridine
  modified_base 52: mod_base = OTHER; note = 2'-O-Methyl-adenosine
  modified_base 53: mod_base = OTHER; note = 2'-O-Methyl-guanosine
  modified_base 54: mod_base = OTHER; note = 2'-O-Methyl-guanosine
  modified_base 57: mod_base = OTHER; note = 2'-O-Methyl-adenosine
  modified_base 61: mod_base = OTHER; note = 2'-O-Methyl-cytidine
  modified_base 64: mod_base = OTHER; note = uridine phosphorothioate
  modified_base 66: mod_base = OTHER; note = 2'-O-Methyl-uridine
  modified_base 67: mod_base = OTHER; note = 2'-O-Methyl-cytidine
  modified_base 70: mod_base = OTHER; note = 2'-O-Methyl-cytidine
  modified_base 71: mod_base = OTHER; note = 2'-O-Methyl-uridine
  modified_base 72: mod_base = OTHER; note = 2'-O-Methyl-uridine
  modified_base 73: mod_base = OTHER; note = 2'-O-Methyl-guanosine
  modified_base 74: mod_base = OTHER; note = 2'-O-Methyl-adenosine
  modified_base 75: mod_base = OTHER; note = 2'-O-Methyl-adenosine
  modified_base 76: mod_base = OTHER; note = 2'-O-Methyl-adenosine
  modified_base 77: mod_base = OTHER; note = 2'-O-Methyl-adenosine
  modified_base 78: mod_base = OTHER; note = 2'-O-Methyl-adenosine
  modified_base 79: mod_base = OTHER; note = 2'-O-Methyl-guanosine
  modified_base 80: mod_base = OTHER; note = 2'-O-Methyl-uridine
  modified_base 82: mod_base = OTHER; note = 2'-O-Methyl-guanosine
  modified_base 83: mod_base = OTHER; note = 2'-O-Methyl-cytidine
  modified_base 84: mod_base = OTHER; note = 2'-O-Methyl-adenosine
  modified_base 85: mod_base = OTHER; note = 2'-O-Methyl-cytidine
  modified_base 86: mod_base = OTHER; note = 2'-O-Methyl-cytidine
  modified_base 87: mod_base = OTHER; note = 2'-O-Methyl-guanosine
  modified_base 89: mod_base = OTHER; note = 2'-O-Methyl-guanosine
  modified_base 92: mod_base = OTHER; note = 2'-O-Methyl-guanosine
  modified_base 93: mod_base = OTHER; note = 2'-O-Methyl-guanosine
  modified_base 94: mod_base = OTHER; note = 2'-O-Methyl-uridine
  modified_base 95: mod_base = OTHER; note = 2'-O-Methyl-guanosine
  modified_base 96: mod_base = OTHER; note = 2'-O-Methyl-cytidine
  modified_base 97: mod_base = OTHER; note = 2'-O-Methyl-uridine phosphorothioate
  modified_base 98: mod_base = OTHER; note = 2'-O-Methyl-uridine phosphorothioate
  modified_base 99: mod_base = OTHER; note = 2'-O-Methyl-uridine phosphorothioate
  modified_base 100: mod_base = OTHER; note = 2'-O-Methyl-uridine
  misc_difference 101: note = a, c, g, inosine, u, deoxyadenosine, deoxyguanosine, deoxycytidine, deoxyinosine, thymine, ribonebularine, 2'-O-methylnebularine, or 2'-deoxynebularine
  misc_difference 102: note = a, c, g, inosine, u, deoxyadenosine, deoxyguanosine, deoxycytidine, deoxyinosine, thymine, ribonebularine, 2'-O-methylnebularine, or 2'-deoxynebularine
  misc_difference 103: note = a, c, g, inosine, u, deoxyadenosine, deoxyguanosine, deoxycytidine, deoxyinosine, thymine, ribonebularine, 2'-O-methylnebularine, or 2'-deoxynebularine

SEQ ID NO: 2924 - RNA, 103 nt, synthetic construct; identical to SEQ ID NO: 1797
  source 1..103: mol_type = other RNA
  modified_base 1: mod_base = OTHER; note = 2'-O-Methyl-cytidine phosphorothioate
  modified_base 2: mod_base = OTHER; note = 2'-O-Methyl-adenosine phosphorothioate
  modified_base 3: mod_base = OTHER; note = 2'-O-Methyl-guanosine
  modified_base 21: mod_base = OTHER; note = 2'-O-Methyl-guanosine
  modified_base 25: mod_base = OTHER; note = uridine phosphorothioate
  modified_base 28: mod_base = OTHER; note = 2'-O-Methyl-adenosine
  modified_base 29: mod_base = OTHER; note = 2'-O-Methyl-guanosine
  modified_base 30: mod_base = OTHER; note = 2'-O-Methyl-cytidine
  modified_base 31: mod_base = OTHER; note = 2'-O-Methyl-uridine
  modified_base 32: mod_base = OTHER; note = 2'-O-Methyl-adenosine
  modified_base 34: mod_base = OTHER; note = 2'-O-Methyl-adenosine
  modified_base 35: mod_base = OTHER; note = 2'-O-Methyl-adenosine
  modified_base 36: mod_base = OTHER; note = 2'-O-Methyl-adenosine
  modified_base 37: mod_base = OTHER; note = 2'-O-Methyl-uridine
  modified_base 38: mod_base = OTHER; note = 2'-O-Methyl-adenosine
  modified_base 39: mod_base = OTHER; note = 2'-O-Methyl-guanosine
  modified_base 40: mod_base = OTHER; note = 2'-O-Methyl-cytidine
  modified_base 41: mod_base = OTHER; note = 2'-O-Methyl-adenosine
  modified_base 42: mod_base = OTHER; note = 2'-O-Methyl-adenosine
  modified_base 46: mod_base = OTHER; note = 2'-O-Methyl-adenosine
  modified_base 48: mod_base = OTHER; note = 2'-O-Methyl-adenosine
  modified_base 50: mod_base = OTHER; note = 2'-O-Methyl-uridine
  modified_base 52: mod_base = OTHER; note = 2'-O-Methyl-adenosine
  modified_base 53: mod_base = OTHER; note = 2'-O-Methyl-guanosine
  modified_base 54: mod_base = OTHER; note = 2'-O-Methyl-guanosine
  modified_base 57: mod_base = OTHER; note = 2'-O-Methyl-adenosine
  modified_base 61: mod_base = OTHER; note = 2'-O-Methyl-cytidine
  modified_base 64: mod_base = OTHER; note = uridine phosphorothioate
  modified_base 66: mod_base = OTHER; note = 2'-O-Methyl-uridine
  modified_base 67: mod_base = OTHER; note = 2'-O-Methyl-cytidine
  modified_base 70: mod_base = OTHER; note = 2'-O-Methyl-cytidine
  modified_base 71: mod_base = OTHER; note = 2'-O-Methyl-uridine
  modified_base 72: mod_base = OTHER; note = 2'-O-Methyl-uridine
  modified_base 73: mod_base = OTHER; note = 2'-O-Methyl-guanosine
  modified_base 74: mod_base = OTHER; note = 2'-O-Methyl-adenosine
  modified_base 75: mod_base = OTHER; note = 2'-O-Methyl-adenosine
  modified_base 76: mod_base = OTHER; note = 2'-O-Methyl-adenosine
  modified_base 77: mod_base = OTHER; note = 2'-O-Methyl-adenosine
  modified_base 78: mod_base = OTHER; note = 2'-O-Methyl-adenosine
  modified_base 79: mod_base = OTHER; note = 2'-O-Methyl-guanosine
  modified_base 80: mod_base = OTHER; note = 2'-O-Methyl-uridine
  modified_base 82: mod_base = OTHER; note = 2'-O-Methyl-guanosine
  modified_base 83: mod_base = OTHER; note = 2'-O-Methyl-cytidine
  modified_base 84: mod_base = OTHER; note = 2'-O-Methyl-adenosine
  modified_base 85: mod_base = OTHER; note = 2'-O-Methyl-cytidine
  modified_base 86: mod_base = OTHER; note = 2'-O-Methyl-cytidine
  modified_base 87: mod_base = OTHER; note = 2'-O-Methyl-guanosine
  modified_base 89: mod_base = OTHER; note = 2'-O-Methyl-guanosine
  modified_base 91: mod_base = OTHER; note = 2'-O-Methyl-cytidine
  modified_base 92: mod_base = OTHER; note = 2'-O-Methyl-guanosine
  modified_base 93: mod_base = OTHER; note = 2'-O-Methyl-guanosine
  modified_base 94: mod_base = OTHER; note = 2'-O-Methyl-uridine
  modified_base 95: mod_base = OTHER; note = 2'-O-Methyl-guanosine
  modified_base 96: mod_base = OTHER; note = 2'-O-Methyl-cytidine
  modified_base 97: mod_base = OTHER; note = 2'-O-Methyl-uridine phosphorothioate
  modified_base 98: mod_base = OTHER; note = 2'-O-Methyl-uridine phosphorothioate
  modified_base 99: mod_base = OTHER; note = 2'-O-Methyl-uridine phosphorothioate
  modified_base 100: mod_base = OTHER; note = 2'-O-Methyl-uridine
  misc_difference 101: note = a, c, g, inosine, u, deoxyadenosine, deoxyguanosine, deoxycytidine, deoxyinosine, thymine, ribonebularine, 2'-O-methylnebularine, or 2'-deoxynebularine
  misc_difference 102: note = a, c, g, inosine, u, deoxyadenosine, deoxyguanosine, deoxycytidine, deoxyinosine, thymine, ribonebularine, 2'-O-methylnebularine, or 2'-deoxynebularine
  misc_difference 103: note = a, c, g, inosine, u, deoxyadenosine, deoxyguanosine, deoxycytidine, deoxyinosine, thymine, ribonebularine, 2'-O-methylnebularine, or 2'-deoxynebularine

SEQ ID NO: 2925 - RNA, 103 nt, synthetic construct; identical to SEQ ID NO: 1797
  source 1..103: mol_type = other RNA
  modified_base 1: mod_base = OTHER; note = 2'-O-Methyl-cytidine phosphorothioate
  modified_base 2: mod_base = OTHER; note = 2'-O-Methyl-adenosine phosphorothioate
  modified_base 3: mod_base = OTHER; note = 2'-O-Methyl-guanosine
  modified_base 21: mod_base = OTHER; note = 2'-O-Methyl-guanosine
  modified_base 25: mod_base = OTHER; note = uridine phosphorothioate
  modified_base 28: mod_base = OTHER; note = 2'-O-Methyl-adenosine
  modified_base 29: mod_base = OTHER; note = 2'-O-Methyl-guanosine
  modified_base 30: mod_base = OTHER; note = 2'-O-Methyl-cytidine
  modified_base 31: mod_base = OTHER; note = 2'-O-Methyl-uridine
  modified_base 32: mod_base = OTHER; note = 2'-O-Methyl-adenosine
  modified_base 34: mod_base = OTHER; note = 2'-O-Methyl-adenosine
  modified_base 35: mod_base = OTHER; note = 2'-O-Methyl-adenosine
  modified_base 36: mod_base = OTHER; note = 2'-O-Methyl-adenosine
  modified_base 37: mod_base = OTHER; note = 2'-O-Methyl-uridine
  modified_base 38: mod_base = OTHER; note = 2'-O-Methyl-adenosine
  modified_base 39: mod_base = OTHER; note = 2'-O-Methyl-guanosine
  modified_base 40: mod_base = OTHER; note = 2'-O-Methyl-cytidine
  modified_base 41: mod_base = OTHER; note = 2'-O-Methyl-adenosine
  modified_base 42: mod_base = OTHER; note = 2'-O-Methyl-adenosine
  modified_base 46: mod_base = OTHER; note = 2'-O-Methyl-adenosine
  modified_base 48: mod_base = OTHER; note = 2'-O-Methyl-adenosine
  modified_base 50: mod_base = OTHER; note = 2'-O-Methyl-uridine
  modified_base 52: mod_base = OTHER; note = 2'-O-Methyl-adenosine
  modified_base 53: mod_base = OTHER; note = 2'-O-Methyl-guanosine
  modified_base 54: mod_base = OTHER; note = 2'-O-Methyl-guanosine
  modified_base 55: mod_base = OTHER; note = 2'-O-Methyl-cytidine
  modified_base 56: mod_base = OTHER; note = 2'-O-Methyl-uridine
  modified_base 57: mod_base = OTHER; note = 2'-O-Methyl-adenosine
  modified_base 60: mod_base = OTHER; note = 2'-O-Methyl-cytidine
  modified_base 61: mod_base = OTHER; note = 2'-O-Methyl-cytidine
  modified_base 64: mod_base = OTHER; note = uridine phosphorothioate
  modified_base 66: mod_base = OTHER; note = 2'-O-Methyl-uridine
  modified_base 67: mod_base = OTHER; note = 2'-O-Methyl-cytidine
  modified_base 70: mod_base = OTHER; note = 2'-O-Methyl-cytidine
  modified_base 71: mod_base = OTHER; note = 2'-O-Methyl-uridine
  modified_base 72: mod_base = OTHER; note = 2'-O-Methyl-uridine
  modified_base 74: mod_base = OTHER; note = 2'-O-Methyl-adenosine
  modified_base 75: mod_base = OTHER; note = 2'-O-Methyl-adenosine
  modified_base 76: mod_base = OTHER; note = 2'-O-Methyl-adenosine
  modified_base 77: mod_base = OTHER; note = 2'-O-Methyl-adenosine
  modified_base 78: mod_base = OTHER; note = 2'-O-Methyl-adenosine
  modified_base 79: mod_base = OTHER; note = 2'-O-Methyl-guanosine
  modified_base 80: mod_base = OTHER; note = 2'-O-Methyl-uridine
  modified_base 82: mod_base = OTHER; note = 2'-O-Methyl-guanosine
  modified_base 83: mod_base = OTHER; note = 2'-O-Methyl-cytidine
  modified_base 84: mod_base = OTHER; note = 2'-O-Methyl-adenosine
  modified_base 85: mod_base = OTHER; note = 2'-O-Methyl-cytidine
  modified_base 86: mod_base = OTHER; note = 2'-O-Methyl-cytidine
  modified_base 87: mod_base = OTHER; note = 2'-O-Methyl-guanosine
  modified_base 89: mod_base = OTHER; note = 2'-O-Methyl-guanosine
  modified_base 92: mod_base = OTHER; note = 2'-O-Methyl-guanosine
  modified_base 93: mod_base = OTHER; note = 2'-O-Methyl-guanosine
  modified_base 94: mod_base = OTHER; note = 2'-O-Methyl-uridine
  modified_base 95: mod_base = OTHER; note = 2'-O-Methyl-guanosine
  modified_base 96: mod_base = OTHER; note = 2'-O-Methyl-cytidine
  modified_base 97: mod_base = OTHER; note = 2'-O-Methyl-uridine phosphorothioate
  modified_base 98: mod_base = OTHER; note = 2'-O-Methyl-uridine phosphorothioate
  modified_base 99: mod_base = OTHER; note = 2'-O-Methyl-uridine phosphorothioate
  modified_base 100: mod_base = OTHER; note = 2'-O-Methyl-uridine
  misc_difference 101: note = a, c, g, inosine, u, deoxyadenosine, deoxyguanosine, deoxycytidine, deoxyinosine, thymine, ribonebularine, 2'-O-methylnebularine, or 2'-deoxynebularine
  misc_difference 102: note = a, c, g, inosine, u, deoxyadenosine, deoxyguanosine, deoxycytidine, deoxyinosine, thymine, ribonebularine, 2'-O-methylnebularine, or 2'-deoxynebularine
  misc_difference 103: note = a, c, g, inosine, u, deoxyadenosine, deoxyguanosine, deoxycytidine, deoxyinosine, thymine, ribonebularine, 2'-O-methylnebularine, or 2'-deoxynebularine

SEQ ID NO: 2926 - RNA, 103 nt, synthetic construct; identical to SEQ ID NO: 1795
  source 1..103: mol_type = other RNA
  modified_base 1: mod_base = OTHER; note = 2'-O-Methyl-cytidine phosphorothioate
  modified_base 2: mod_base = OTHER; note = 2'-O-Methyl-cytidine phosphorothioate
  modified_base 3: mod_base = OTHER; note = 2'-O-Methyl-cytidine
  modified_base 21: mod_base = OTHER; note = 2'-O-Methyl-guanosine
  modified_base 25: mod_base = OTHER; note = uridine phosphorothioate
  modified_base 28: mod_base = OTHER; note = 2'-O-Methyl-adenosine
  modified_base 29: mod_base = OTHER; note = 2'-O-Methyl-guanosine
  modified_base 30: mod_base = OTHER; note = 2'-O-Methyl-cytidine
  modified_base 31: mod_base = OTHER; note = 2'-O-Methyl-uridine
  modified_base 32: mod_base = OTHER; note = 2'-O-Methyl-adenosine
  modified_base 33: mod_base = OTHER; note = 2'-O-Methyl-guanosine
  modified_base 34: mod_base = OTHER; note = 2'-O-Methyl-adenosine
  modified_base 35: mod_base = OTHER; note = 2'-O-Methyl-adenosine
  modified_base 36: mod_base = OTHER; note = 2'-O-Methyl-adenosine
  modified_base 37: mod_base = OTHER; note = 2'-O-Methyl-uridine
  modified_base 38: mod_base = OTHER; note = 2'-O-Methyl-adenosine
  modified_base 39: mod_base = OTHER; note = 2'-O-Methyl-guanosine
  modified_base 40: mod_base = OTHER; note = 2'-O-Methyl-cytidine
  modified_base 41: mod_base = OTHER; note = 2'-O-Methyl-adenosine
  modified_base 42: mod_base = OTHER; note = 2'-O-Methyl-adenosine
  modified_base 45: mod_base = OTHER; note = uridine phosphorothioate
  modified_base 46: mod_base = OTHER; note = 2'-O-Methyl-adenosine
  modified_base 48: mod_base = OTHER; note = 2'-O-Methyl-adenosine
  modified_base 50: mod_base = OTHER; note = 2'-O-Methyl-uridine
  modified_base 52: mod_base = OTHER; note = 2'-O-Methyl-adenosine
  modified_base 53: mod_base = OTHER; note = 2'-O-Methyl-guanosine
  modified_base 54: mod_base = OTHER; note = 2'-O-Methyl-guanosine
  modified_base 55: mod_base = OTHER; note = 2'-O-Methyl-cytidine
  modified_base 56: mod_base = OTHER; note = 2'-O-Methyl-uridine
  modified_base 57: mod_base = OTHER; note = 2'-O-Methyl-adenosine
  modified_base 60: mod_base = OTHER; note = 2'-O-Methyl-cytidine
  modified_base 61: mod_base = OTHER; note = 2'-O-Methyl-cytidine
  modified_base 64: mod_base = OTHER; note = uridine phosphorothioate
  modified_base 66: mod_base = OTHER; note = 2'-O-Methyl-uridine
  modified_base 67: mod_base = OTHER; note = 2'-O-Methyl-cytidine
  modified_base 70: mod_base = OTHER; note = 2'-O-Methyl-cytidine
  modified_base 71: mod_base = OTHER; note = 2'-O-Methyl-uridine
  modified_base 72: mod_base = OTHER; note = 2'-O-Methyl-uridine
  modified_base 73: mod_base = OTHER; note = 2'-O-Methyl-guanosine
  modified_base 74: mod_base = OTHER; note = 2'-O-Methyl-adenosine
  modified_base 75: mod_base = OTHER; note = 2'-O-Methyl-adenosine
  modified_base 76: mod_base = OTHER; note = 2'-O-Methyl-adenosine
  modified_base 77: mod_base = OTHER; note = 2'-O-Methyl-adenosine
  modified_base 78: mod_base = OTHER; note = 2'-O-Methyl-adenosine
  modified_base 79: mod_base = OTHER; note = 2'-O-Methyl-guanosine
  modified_base 80: mod_base = OTHER; note = 2'-O-Methyl-uridine
  modified_base 81: mod_base = OTHER; note = 2'-O-Methyl-guanosine
  modified_base 83: mod_base = OTHER; note = 2'-O-Methyl-cytidine
  modified_base 84: mod_base = OTHER; note = 2'-O-Methyl-adenosine
  modified_base 85: mod_base = OTHER; note = 2'-O-Methyl-cytidine
  modified_base 86: mod_base = OTHER; note = 2'-O-Methyl-cytidine
  modified_base 87: mod_base = OTHER; note = 2'-O-Methyl-guanosine
  modified_base 88: mod_base = OTHER; note = 2'-O-Methyl-adenosine
  modified_base 89: mod_base = OTHER; note = 2'-O-Methyl-guanosine
  modified_base 90: mod_base = OTHER; note = 2'-O-Methyl-uridine
  modified_base 91: mod_base = OTHER; note = 2'-O-Methyl-cytidine
  modified_base 92: mod_base = OTHER; note = 2'-O-Methyl-guanosine
  modified_base 93: mod_base = OTHER; note = 2'-O-Methyl-guanosine
  modified_base 94: mod_base = OTHER; note = 2'-O-Methyl-uridine
  modified_base 95: mod_base = OTHER; note = 2'-O-Methyl-guanosine
  modified_base 96: mod_base = OTHER; note = 2'-O-Methyl-cytidine
  modified_base 97: mod_base = OTHER; note = 2'-O-Methyl-uridine phosphorothioate
  modified_base 98: mod_base = OTHER; note = 2'-O-Methyl-uridine phosphorothioate
  modified_base 99: mod_base = OTHER; note = 2'-O-Methyl-uridine phosphorothioate
  modified_base 100: mod_base = OTHER; note = 2'-O-Methyl-uridine
  misc_difference 101: note = a, c, g, inosine, u, deoxyadenosine, deoxyguanosine, deoxycytidine, deoxyinosine, thymine, ribonebularine, 2'-O-methylnebularine, or 2'-deoxynebularine
  misc_difference 102: note = a, c, g, inosine, u, deoxyadenosine, deoxyguanosine, deoxycytidine, deoxyinosine, thymine, ribonebularine, 2'-O-methylnebularine, or 2'-deoxynebularine
  misc_difference 103: note = a, c, g, inosine, u, deoxyadenosine, deoxyguanosine, deoxycytidine, deoxyinosine, thymine, ribonebularine, 2'-O-methylnebularine, or 2'-deoxynebularine

SEQ ID NO: 2927 - RNA, 103 nt, synthetic construct; identical to SEQ ID NO: 1795
  source 1..103: mol_type = other RNA
  modified_base 1: mod_base = OTHER; note = 2'-O-Methyl-cytidine phosphorothioate
  modified_base 2: mod_base = OTHER; note = 2'-O-Methyl-cytidine phosphorothioate
  modified_base 3: mod_base = OTHER; note = 2'-O-Methyl-cytidine
  modified_base 21: mod_base = OTHER; note = 2'-O-Methyl-guanosine
  modified_base 25: mod_base = OTHER; note = uridine phosphorothioate
  modified_base 28: mod_base = OTHER; note = 2'-O-Methyl-adenosine
  modified_base 29: mod_base = OTHER; note = 2'-O-Methyl-guanosine
  modified_base 30: mod_base = OTHER; note = 2'-O-Methyl-cytidine
  modified_base 31: mod_base = OTHER; note = 2'-O-Methyl-uridine
  modified_base 32: mod_base = OTHER; note = 2'-O-Methyl-adenosine
  modified_base 34: mod_base = OTHER; note = 2'-O-Methyl-adenosine
  modified_base 35: mod_base = OTHER; note = 2'-O-Methyl-adenosine
  modified_base 36: mod_base = OTHER; note = 2'-O-Methyl-adenosine
  modified_base 37: mod_base = OTHER; note = 2'-O-Methyl-uridine
  modified_base 38: mod_base = OTHER; note = 2'-O-Methyl-adenosine
  modified_base 39: mod_base = OTHER; note = 2'-O-Methyl-guanosine
  modified_base 40: mod_base = OTHER; note = 2'-O-Methyl-cytidine
  modified_base 41: mod_base = OTHER; note = 2'-O-Methyl-adenosine
  modified_base 42: mod_base = OTHER; note = 2'-O-Methyl-adenosine
  modified_base 45: mod_base = OTHER; note = uridine phosphorothioate
  modified_base 46: mod_base = OTHER; note = 2'-O-Methyl-adenosine
  modified_base 48: mod_base = OTHER; note = 2'-O-Methyl-adenosine
  modified_base 50: mod_base = OTHER; note = 2'-O-Methyl-uridine
  modified_base 52: mod_base = OTHER; note = 2'-O-Methyl-adenosine
  modified_base 53: mod_base = OTHER; note = 2'-O-Methyl-guanosine
  modified_base 54: mod_base = OTHER; note = 2'-O-Methyl-guanosine
  modified_base 55: mod_base = OTHER; note = 2'-O-Methyl-cytidine
  modified_base 56: mod_base = OTHER; note = 2'-O-Methyl-uridine
  modified_base 57: mod_base = OTHER; note = 2'-O-Methyl-adenosine
  modified_base 60: mod_base = OTHER; note = 2'-O-Methyl-cytidine
  modified_base 61: mod_base = OTHER; note = 2'-O-Methyl-cytidine
  modified_base 64: mod_base = OTHER; note = uridine phosphorothioate
  modified_base 66: mod_base = OTHER; note = 2'-O-Methyl-uridine
  modified_base 67: mod_base = OTHER; note = 2'-O-Methyl-cytidine
  modified_base 70: mod_base = OTHER; note = 2'-O-Methyl-cytidine
  modified_base 71: mod_base = OTHER; note = 2'-O-Methyl-uridine
  modified_base 72: mod_base = OTHER; note = 2'-O-Methyl-uridine
  modified_base 74: mod_base = OTHER; note = 2'-O-Methyl-adenosine
  modified_base 75: mod_base = OTHER; note = 2'-O-Methyl-adenosine
  modified_base 76: mod_base = OTHER; note = 2'-O-Methyl-adenosine
  modified_base 77: mod_base = OTHER; note = 2'-O-Methyl-adenosine
  modified_base 78: mod_base = OTHER; note = 2'-O-Methyl-adenosine
  modified_base 79: mod_base = OTHER; note = 2'-O-Methyl-guanosine
  modified_base 80: mod_base = OTHER; note = 2'-O-Methyl-uridine
  modified_base 81: mod_base = OTHER; note = 2'-O-Methyl-guanosine
  modified_base 83: mod_base = OTHER; note = 2'-O-Methyl-cytidine
  modified_base 84: mod_base = OTHER; note = 2'-O-Methyl-adenosine
  modified_base 85: mod_base = OTHER; note = 2'-O-Methyl-cytidine
  modified_base 86: mod_base = OTHER; note = 2'-O-Methyl-cytidine
  modified_base 87: mod_base = OTHER; note = 2'-O-Methyl-guanosine
  modified_base 88: mod_base = OTHER; note = 2'-O-Methyl-adenosine
  modified_base 89: mod_base = OTHER; note = 2'-O-Methyl-guanosine
  modified_base 90: mod_base = OTHER; note = 2'-O-Methyl-uridine
  modified_base 91: mod_base = OTHER; note = 2'-O-Methyl-cytidine
  modified_base 92: mod_base = OTHER; note = 2'-O-Methyl-guanosine
  modified_base 93: mod_base = OTHER; note = 2'-O-Methyl-guanosine
  modified_base 94: mod_base = OTHER; note = 2'-O-Methyl-uridine
  modified_base 95: mod_base = OTHER; note = 2'-O-Methyl-guanosine
  modified_base 96: mod_base = OTHER; note = 2'-O-Methyl-cytidine
  modified_base 97: mod_base = OTHER; note = 2'-O-Methyl-uridine phosphorothioate
  modified_base 98: mod_base = OTHER; note = 2'-O-Methyl-uridine phosphorothioate
  modified_base 99: mod_base = OTHER; note = 2'-O-Methyl-uridine phosphorothioate
  modified_base 100: mod_base = OTHER; note = 2'-O-Methyl-uridine
  misc_difference 101: note = a, c, g, inosine, u, deoxyadenosine, deoxyguanosine, deoxycytidine, deoxyinosine, thymine, ribonebularine, 2'-O-methylnebularine, or 2'-deoxynebularine
  misc_difference 102: note = a, c, g, inosine, u, deoxyadenosine, deoxyguanosine, deoxycytidine, deoxyinosine, thymine, ribonebularine, 2'-O-methylnebularine, or 2'-deoxynebularine
  misc_difference 103: note = a, c, g, inosine, u, deoxyadenosine, deoxyguanosine, deoxycytidine, deoxyinosine, thymine, ribonebularine, 2'-O-methylnebularine, or 2'-deoxynebularine

SEQ ID NO: 2928 - RNA, 103 nt, synthetic construct; identical to SEQ ID NO: 1796
  source 1..103: mol_type = other RNA
  modified_base 1: mod_base = OTHER; note = 2'-O-Methyl-guanosine phosphorothioate
  modified_base 2: mod_base = OTHER; note = 2'-O-Methyl-adenosine phosphorothioate
  modified_base 3: mod_base = OTHER; note = 2'-O-Methyl-guanosine
  modified_base 21: mod_base = OTHER; note = 2'-O-Methyl-guanosine
  modified_base 25: mod_base = OTHER; note = uridine phosphorothioate
  modified_base 28: mod_base = OTHER; note = 2'-O-Methyl-adenosine
  modified_base 29: mod_base = OTHER; note = 2'-O-Methyl-guanosine
  modified_base 30: mod_base = OTHER; note = 2'-O-Methyl-cytidine
  modified_base 31: mod_base = OTHER; note = 2'-O-Methyl-uridine
  modified_base 32: mod_base = OTHER; note = 2'-O-Methyl-adenosine
  modified_base 34: mod_base = OTHER; note = 2'-O-Methyl-adenosine
  modified_base 35: mod_base = OTHER; note = 2'-O-Methyl-adenosine
  modified_base 36: mod_base = OTHER; note = 2'-O-Methyl-adenosine
  modified_base 37: mod_base = OTHER; note = 2'-O-Methyl-uridine
  modified_base 38: mod_base = OTHER; note = 2'-O-Methyl-adenosine
  modified_base 39: mod_base = OTHER; note = 2'-O-Methyl-guanosine
  modified_base 40: mod_base = OTHER; note = 2'-O-Methyl-cytidine
  modified_base 41: mod_base = OTHER; note = 2'-O-Methyl-adenosine
  modified_base 42: mod_base = OTHER; note = 2'-O-Methyl-adenosine
  modified_base 45: mod_base = OTHER; note = uridine phosphorothioate
  modified_base 46: mod_base = OTHER; note = 2'-O-Methyl-adenosine
  modified_base 48: mod_base = OTHER; note = 2'-O-Methyl-adenosine
  modified_base 50: mod_base = OTHER; note = 2'-O-Methyl-uridine
  modified_base 52: mod_base = OTHER; note = 2'-O-Methyl-adenosine
  modified_base 53: mod_base = OTHER; note = 2'-O-Methyl-guanosine
  modified_base 54: mod_base = OTHER; note = 2'-O-Methyl-guanosine
  modified_base 55: mod_base = OTHER; note = 2'-O-Methyl-cytidine
  modified_base 56: mod_base = OTHER; note = 2'-O-Methyl-uridine
  modified_base 57: mod_base = OTHER; note = 2'-O-Methyl-adenosine
  modified_base 60: mod_base = OTHER; note = 2'-O-Methyl-cytidine
  modified_base 61: mod_base = OTHER; note = 2'-O-Methyl-cytidine
  modified_base 64: mod_base = OTHER; note = uridine phosphorothioate
  modified_base 66: mod_base = OTHER; note = 2'-O-Methyl-uridine
  modified_base 67: mod_base = OTHER; note = 2'-O-Methyl-cytidine
  modified_base 70: mod_base = OTHER; note = 2'-O-Methyl-cytidine
  modified_base 71: mod_base = OTHER; note = 2'-O-Methyl-uridine
  modified_base 72: mod_base = OTHER; note = 2'-O-Methyl-uridine
  modified_base 74: mod_base = OTHER; note = 2'-O-Methyl-adenosine
  modified_base 75: mod_base = OTHER; note = 2'-O-Methyl-adenosine
  modified_base 76: mod_base = OTHER; note = 2'-O-Methyl-adenosine
  modified_base 77: mod_base = OTHER; note = 2'-O-Methyl-adenosine
  modified_base 78: mod_base = OTHER; note = 2'-O-Methyl-adenosine
  modified_base 79: mod_base = OTHER; note = 2'-O-Methyl-guanosine
  modified_base 80: mod_base = OTHER; note = 2'-O-Methyl-uridine
  modified_base 81: mod_base = OTHER; note = 2'-O-Methyl-guanosine
  modified_base 83: mod_base = OTHER; note = 2'-O-Methyl-cytidine
  modified_base 84: mod_base = OTHER; note = 2'-O-Methyl-adenosine
  modified_base 85: mod_base = OTHER; note = 2'-O-Methyl-cytidine
  modified_base 86: mod_base = OTHER; note = 2'-O-Methyl-cytidine
  modified_base 87: mod_base = OTHER; note = 2'-O-Methyl-guanosine
  modified_base 88: mod_base = OTHER; note = 2'-O-Methyl-adenosine
  modified_base 89: mod_base = OTHER; note = 2'-O-Methyl-guanosine
  modified_base 90: mod_base = OTHER; note = 2'-O-Methyl-uridine
  modified_base 91: mod_base = OTHER; note = 2'-O-Methyl-cytidine
  modified_base 92: mod_base = OTHER; note = 2'-O-Methyl-guanosine
  modified_base 93: mod_base = OTHER; note = 2'-O-Methyl-guanosine
  modified_base 94: mod_base = OTHER; note = 2'-O-Methyl-uridine
  modified_base 95: mod_base = OTHER; note = 2'-O-Methyl-guanosine
  modified_base 96: mod_base = OTHER; note = 2'-O-Methyl-cytidine
  modified_base 97: mod_base = OTHER; note = 2'-O-Methyl-uridine phosphorothioate
  modified_base 98: mod_base = OTHER; note = 2'-O-Methyl-uridine phosphorothioate
  modified_base 99: mod_base = OTHER; note = 2'-O-Methyl-uridine phosphorothioate
  modified_base 100: mod_base = OTHER; note = 2'-O-Methyl-uridine
  misc_difference 101: note = a, c, g, inosine, u, deoxyadenosine, deoxyguanosine, deoxycytidine, deoxyinosine, thymine, ribonebularine, 2'-O-methylnebularine, or 2'-deoxynebularine
  misc_difference 102: note = a, c, g, inosine, u, deoxyadenosine, deoxyguanosine, deoxycytidine, deoxyinosine, thymine, ribonebularine, 2'-O-methylnebularine, or 2'-deoxynebularine
  misc_difference 103: note = a, c, g, inosine, u, deoxyadenosine, deoxyguanosine, deoxycytidine, deoxyinosine, thymine, ribonebularine, 2'-O-methylnebularine, or 2'-deoxynebularine

SEQ ID NO: 2929 - RNA, 103 nt, synthetic construct; identical to SEQ ID NO: 1797
  source 1..103: mol_type = other RNA
  modified_base 1: mod_base = OTHER; note = 2'-O-Methyl-cytidine phosphorothioate
  modified_base 2: mod_base = OTHER; note = 2'-O-Methyl-adenosine phosphorothioate
  modified_base 3: mod_base = OTHER; note = 2'-O-Methyl-guanosine
  modified_base 21: mod_base = OTHER; note = 2'-O-Methyl-guanosine
  modified_base 25: mod_base = OTHER; note = uridine phosphorothioate
  modified_base 28: mod_base = OTHER; note = 2'-O-Methyl-adenosine
  modified_base 29: mod_base = OTHER; note = 2'-O-Methyl-guanosine
  modified_base 30: mod_base = OTHER; note = 2'-O-Methyl-cytidine
  modified_base 31: mod_base = OTHER; note = 2'-O-Methyl-uridine
  modified_base 32: mod_base = OTHER; note = 2'-O-Methyl-adenosine
  modified_base 33: mod_base = OTHER; note = 2'-O-Methyl-guanosine
  modified_base 34: mod_base = OTHER; note = 2'-O-Methyl-adenosine
  modified_base 35: mod_base = OTHER; note = 2'-O-Methyl-adenosine
  modified_base 36: mod_base = OTHER; note = 2'-O-Methyl-adenosine
  modified_base 37: mod_base = OTHER; note = 2'-O-Methyl-uridine
  modified_base 38: mod_base = OTHER; note = 2'-O-Methyl-adenosine
  modified_base 39: mod_base = OTHER; note = 2'-O-Methyl-guanosine
  modified_base 40: mod_base = OTHER; note = 2'-O-Methyl-cytidine
  modified_base 41: mod_base = OTHER; note = 2'-O-Methyl-adenosine
  modified_base 42: mod_base = OTHER; note = 2'-O-Methyl-adenosine
  modified_base 45: mod_base = OTHER; note = uridine phosphorothioate
  modified_base 46: mod_base = OTHER; note = 2'-O-Methyl-adenosine
  modified_base 48: mod_base = OTHER; note = 2'-O-Methyl-adenosine
  modified_base 50: mod_base = OTHER; note = 2'-O-Methyl-uridine
  modified_base 52: mod_base = OTHER; note = 2'-O-Methyl-adenosine
  modified_base 53: mod_base = OTHER; note = 2'-O-Methyl-guanosine
  modified_base 54: mod_base = OTHER; note = 2'-O-Methyl-guanosine
  modified_base 57: mod_base = OTHER; note = 2'-O-Methyl-adenosine
  modified_base 61: mod_base = OTHER; note = 2'-O-Methyl-cytidine
  modified_base 64: mod_base = OTHER; note = uridine phosphorothioate
  modified_base 66: mod_base = OTHER; note = 2'-O-Methyl-uridine
  modified_base 67: mod_base = OTHER; note = 2'-O-Methyl-cytidine
  modified_base 70: mod_base = OTHER; note = 2'-O-Methyl-cytidine
  modified_base 71: mod_base = OTHER; note = 2'-O-Methyl-uridine
  modified_base 72: mod_base = OTHER; note = 2'-O-Methyl-uridine
  modified_base 74: mod_base = OTHER; note = 2'-O-Methyl-adenosine
  modified_base 75: mod_base = OTHER; note = 2'-O-Methyl-adenosine
  modified_base 76: mod_base = OTHER; note = 2'-O-Methyl-adenosine
  modified_base 77: mod_base = OTHER; note = 2'-O-Methyl-adenosine
  modified_base 78: mod_base = OTHER; note = 2'-O-Methyl-adenosine
  modified_base 79: mod_base = OTHER; note = 2'-O-Methyl-guanosine
  modified_base 80: mod_base = OTHER; note = 2'-O-Methyl-uridine
  modified_base 82: mod_base = OTHER; note = 2'-O-Methyl-guanosine
  modified_base 83: mod_base = OTHER; note = 2'-O-Methyl-cytidine
  modified_base 84: mod_base = OTHER; note = 2'-O-Methyl-adenosine
  modified_base 85: mod_base = OTHER; note = 2'-O-Methyl-cytidine
  modified_base 86: mod_base = OTHER; note = 2'-O-Methyl-cytidine
  modified_base 87: mod_base = OTHER; note = 2'-O-Methyl-guanosine
  modified_base 89: mod_base = OTHER; note = 2'-O-Methyl-guanosine
  modified_base 92: mod_base = OTHER; note = 2'-O-Methyl-guanosine
  modified_base 93: mod_base = OTHER; note = 2'-O-Methyl-guanosine
  modified_base 94: mod_base = OTHER; note = 2'-O-Methyl-uridine
  modified_base 95: mod_base = OTHER; note = 2'-O-Methyl-guanosine
  modified_base 96: mod_base = OTHER; note = 2'-O-Methyl-cytidine
  modified_base 97: mod_base = OTHER; note = 2'-O-Methyl-uridine phosphorothioate
  modified_base 98: mod_base = OTHER; note = 2'-O-Methyl-uridine phosphorothioate
  modified_base 99: mod_base = OTHER; note = 2'-O-Methyl-uridine phosphorothioate
  modified_base 100: mod_base = OTHER; note = 2'-O-Methyl-uridine
  misc_difference 101: note = a, c, g, inosine, u, deoxyadenosine, deoxyguanosine, deoxycytidine, deoxyinosine, thymine, ribonebularine, 2'-O-methylnebularine, or 2'-deoxynebularine
  misc_difference 102: note = a, c, g, inosine, u, deoxyadenosine, deoxyguanosine, deoxycytidine, deoxyinosine, thymine, ribonebularine, 2'-O-methylnebularine, or 2'-deoxynebularine
  misc_difference 103: note = a, c, g, inosine, u, deoxyadenosine, deoxyguanosine, deoxycytidine, deoxyinosine, thymine, ribonebularine, 2'-O-methylnebularine, or 2'-deoxynebularine

SEQ ID NO: 2930 - RNA, 103 nt, synthetic construct; identical to SEQ ID NO: 1797
  source 1..103: mol_type = other RNA
  modified_base 1: mod_base = OTHER; note = 2'-O-Methyl-cytidine phosphorothioate
  modified_base 2: mod_base = OTHER; note = 2'-O-Methyl-adenosine phosphorothioate
  modified_base 3: mod_base = OTHER; note = 2'-O-Methyl-guanosine
  modified_base 21: mod_base = OTHER; note = 2'-O-Methyl-guanosine
  modified_base 25: mod_base = OTHER; note = uridine phosphorothioate
  modified_base 28: mod_base = OTHER; note = 2'-O-Methyl-adenosine
  modified_base 29: mod_base = OTHER; note = 2'-O-Methyl-guanosine
  modified_base 30: mod_base = OTHER; note = 2'-O-Methyl-cytidine
  modified_base 31: mod_base = OTHER; note = 2'-O-Methyl-uridine
  modified_base 32: mod_base = OTHER; note = 2'-O-Methyl-adenosine
  modified_base 33: mod_base = OTHER; note = 2'-O-Methyl-guanosine
  modified_base 34: mod_base = OTHER; note = 2'-O-Methyl-adenosine
  modified_base 35: mod_base = OTHER; note = 2'-O-Methyl-adenosine
  modified_base 36: mod_base = OTHER; note = 2'-O-Methyl-adenosine
  modified_base 37: mod_base = OTHER; note = 2'-O-Methyl-uridine
  modified_base 38: mod_base = OTHER; note = 2'-O-Methyl-adenosine
  modified_base 39: mod_base = OTHER; note = 2'-O-Methyl-guanosine
  modified_base 40: mod_base = OTHER; note = 2'-O-Methyl-cytidine
  modified_base 41: mod_base = OTHER; note = 2'-O-Methyl-adenosine
  modified_base 42: mod_base = OTHER; note = 2'-O-Methyl-adenosine
  modified_base 45: mod_base = OTHER; note = uridine phosphorothioate
  modified_base 46: mod_base = OTHER; note = 2'-O-Methyl-adenosine
  modified_base 48: mod_base = OTHER; note = 2'-O-Methyl-adenosine
  modified_base 50: mod_base = OTHER; note = 2'-O-Methyl-uridine
  modified_base 52: mod_base = OTHER; note = 2'-O-Methyl-adenosine
  modified_base 53: mod_base = OTHER; note = 2'-O-Methyl-guanosine
  modified_base 54: mod_base = OTHER; note = 2'-O-Methyl-guanosine
  modified_base 55: mod_base = OTHER; note = 2'-O-Methyl-cytidine
  modified_base 56: mod_base = OTHER; note = 2'-O-Methyl-uridine
  modified_base 57: mod_base = OTHER; note = 2'-O-Methyl-adenosine
  modified_base 60: mod_base = OTHER; note = 2'-O-Methyl-cytidine
  modified_base 61: mod_base = OTHER; note = 2'-O-Methyl-cytidine
  modified_base 64: mod_base = OTHER; note = uridine phosphorothioate
  modified_base 66: mod_base = OTHER; note = 2'-O-Methyl-uridine
  modified_base 67: mod_base = OTHER; note = 2'-O-Methyl-cytidine
  modified_base 70: mod_base = OTHER; note = 2'-O-Methyl-cytidine
  modified_base 71: mod_base = OTHER; note = 2'-O-Methyl-uridine
  modified_base 72: mod_base = OTHER; note = 2'-O-Methyl-uridine
  modified_base 74: mod_base = OTHER; note = 2'-O-Methyl-adenosine
  modified_base 75: mod_base = OTHER; note = 2'-O-Methyl-adenosine
  modified_base 76: mod_base = OTHER; note = 2'-O-Methyl-adenosine
  modified_base 77: mod_base = OTHER; note = 2'-O-Methyl-adenosine
  modified_base 78: mod_base = OTHER; note = 2'-O-Methyl-adenosine
  modified_base 79: mod_base = OTHER; note = 2'-O-Methyl-guanosine
  modified_base 80: mod_base = OTHER; note = 2'-O-Methyl-uridine
  modified_base 82: mod_base = OTHER; note = 2'-O-Methyl-guanosine
  modified_base 83: mod_base = OTHER; note = 2'-O-Methyl-cytidine
  modified_base 84: mod_base = OTHER; note = 2'-O-Methyl-adenosine
  modified_base 85: mod_base = OTHER; note = 2'-O-Methyl-cytidine
  modified_base 86: mod_base = OTHER; note = 2'-O-Methyl-cytidine
  modified_base 87: mod_base = OTHER; note = 2'-O-Methyl-guanosine
  modified_base 89: mod_base = OTHER; note = 2'-O-Methyl-guanosine
  modified_base 92: mod_base = OTHER; note = 2'-O-Methyl-guanosine
  modified_base 93: mod_base = OTHER; note = 2'-O-Methyl-guanosine
  modified_base 94: mod_base = OTHER; note = 2'-O-Methyl-uridine
  modified_base 95: mod_base = OTHER; note = 2'-O-Methyl-guanosine
  modified_base 96: mod_base = OTHER; note = 2'-O-Methyl-cytidine
  modified_base 97: mod_base = OTHER; note = 2'-O-Methyl-uridine phosphorothioate
  modified_base 98: mod_base = OTHER; note = 2'-O-Methyl-uridine phosphorothioate
  modified_base 99: mod_base = OTHER; note = 2'-O-Methyl-uridine phosphorothioate
  modified_base 100: mod_base = OTHER; note = 2'-O-Methyl-uridine
  misc_difference 101: note = a, c, g, inosine, u, deoxyadenosine, deoxyguanosine, deoxycytidine, deoxyinosine, thymine, ribonebularine, 2'-O-methylnebularine, or 2'-deoxynebularine
  misc_difference 102: note = a, c, g, inosine, u, deoxyadenosine, deoxyguanosine, deoxycytidine, deoxyinosine, thymine, ribonebularine, 2'-O-methylnebularine, or 2'-deoxynebularine
  misc_difference 103: note = a, c, g, inosine, u, deoxyadenosine, deoxyguanosine, deoxycytidine, deoxyinosine, thymine, ribonebularine, 2'-O-methylnebularine, or 2'-deoxynebularine

SEQ ID NO: 2931 - RNA, 103 nt, synthetic construct; identical to SEQ ID NO: 1797
  source 1..103: mol_type = other RNA
  modified_base 1: mod_base = OTHER; note = 2'-O-Methyl-cytidine phosphorothioate
  modified_base 2: mod_base = OTHER; note = 2'-O-Methyl-adenosine phosphorothioate
  modified_base 3: mod_base = OTHER; note = 2'-O-Methyl-guanosine
  modified_base 21: mod_base = OTHER; note = 2'-O-Methyl-guanosine
  modified_base 25: mod_base = OTHER; note = uridine phosphorothioate
  modified_base 28: mod_base = OTHER; note = 2'-O-Methyl-adenosine
  modified_base 29: mod_base = OTHER; note = 2'-O-Methyl-guanosine
  modified_base 30: mod_base = OTHER; note = 2'-O-Methyl-cytidine
  modified_base 31: mod_base = OTHER; note = 2'-O-Methyl-uridine
  modified_base 32: mod_base = OTHER; note = 2'-O-Methyl-adenosine
  modified_base 33: mod_base = OTHER; note = 2'-O-Methyl-guanosine
  modified_base 34: mod_base = OTHER; note = 2'-O-Methyl-adenosine
  modified_base 35: mod_base = OTHER; note = 2'-O-Methyl-adenosine
  modified_base 36: mod_base = OTHER; note = 2'-O-Methyl-adenosine
  modified_base 37: mod_base = OTHER; note = 2'-O-Methyl-uridine
  modified_base 38: mod_base = OTHER; note = 2'-O-Methyl-adenosine
  modified_base 39: mod_base = OTHER; note = 2'-O-Methyl-guanosine
  modified_base 40: mod_base = OTHER; note = 2'-O-Methyl-cytidine
  modified_base 41: mod_base = OTHER; note = 2'-O-Methyl-adenosine
  modified_base 42: mod_base = OTHER; note = 2'-O-Methyl-adenosine
  modified_base 45: mod_base = OTHER; note = uridine phosphorothioate
  modified_base 46: mod_base = OTHER; note = 2'-O-Methyl-adenosine
  modified_base 48: mod_base = OTHER; note = 2'-O-Methyl-adenosine
  modified_base 50: mod_base = OTHER; note = 2'-O-Methyl-uridine
  modified_base 52: mod_base = OTHER; note = 2'-O-Methyl-adenosine
  modified_base 53: mod_base = OTHER; note = 2'-O-Methyl-guanosine
  modified_base 54: mod_base = OTHER; note = 2'-O-Methyl-guanosine
  modified_base 57: mod_base = OTHER; note = 2'-O-Methyl-adenosine
  modified_base 61: mod_base = OTHER; note = 2'-O-Methyl-cytidine
  modified_base 64: mod_base = OTHER; note = uridine phosphorothioate
  modified_base 66: mod_base = OTHER; note = 2'-O-Methyl-uridine
  modified_base 67: mod_base = OTHER; note = 2'-O-Methyl-cytidine
  modified_base 70: mod_base = OTHER; note = 2'-O-Methyl-cytidine
  modified_base 71: mod_base = OTHER; note = 2'-O-Methyl-uridine
  modified_base 72: mod_base = OTHER; note = 2'-O-Methyl-uridine
  modified_base 73: mod_base = OTHER; note = 2'-O-Methyl-guanosine
  modified_base 74: mod_base = OTHER; note = 2'-O-Methyl-adenosine
  modified_base 75: mod_base = OTHER; note = 2'-O-Methyl-adenosine
  modified_base 76: mod_base = OTHER; note = 2'-O-Methyl-adenosine
  modified_base 77: mod_base = OTHER; note = 2'-O-Methyl-adenosine
  modified_base 78: mod_base = OTHER; note = 2'-O-Methyl-adenosine
  modified_base 79: mod_base = OTHER; note = 2'-O-Methyl-guanosine
  modified_base 80: mod_base = OTHER; note = 2'-O-Methyl-uridine
  modified_base 82: mod_base = OTHER; note = 2'-O-Methyl-guanosine
  modified_base 83: mod_base = OTHER; note = 2'-O-Methyl-cytidine
  modified_base 84: mod_base = OTHER; note = 2'-O-Methyl-adenosine
  modified_base 85: mod_base = OTHER; note = 2'-O-Methyl-cytidine
  modified_base 86: mod_base = OTHER; note = 2'-O-Methyl-cytidine
  modified_base 87: mod_base = OTHER; note = 2'-O-Methyl-guanosine
  modified_base 89: mod_base = OTHER; note = 2'-O-Methyl-guanosine
  modified_base 92: mod_base = OTHER; note = 2'-O-Methyl-guanosine
  modified_base 93: mod_base = OTHER; note = 2'-O-Methyl-guanosine
  modified_base 94: mod_base = OTHER; note = 2'-O-Methyl-uridine
  modified_base 95: mod_base = OTHER; note = 2'-O-Methyl-guanosine
  modified_base 96: mod_base = OTHER; note = 2'-O-Methyl-cytidine
  modified_base 97: mod_base = OTHER; note = 2'-O-Methyl-uridine phosphorothioate
  modified_base 98: mod_base = OTHER; note = 2'-O-Methyl-uridine phosphorothioate
  modified_base 99: mod_base = OTHER; note = 2'-O-Methyl-uridine phosphorothioate
  modified_base 100: mod_base = OTHER; note = 2'-O-Methyl-uridine
  misc_difference 101: note = a, c, g, inosine, u, deoxyadenosine, deoxyguanosine, deoxycytidine, deoxyinosine, thymine, ribonebularine, 2'-O-methylnebularine, or 2'-deoxynebularine
  misc_difference 102: note = a, c, g, inosine, u, deoxyadenosine, deoxyguanosine, deoxycytidine, deoxyinosine, thymine, ribonebularine, 2'-O-methylnebularine, or 2'-deoxynebularine
  misc_difference 103: note = a, c, g, inosine, u, deoxyadenosine, deoxyguanosine, deoxycytidine, deoxyinosine, thymine, ribonebularine, 2'-O-methylnebularine, or 2'-deoxynebularine

SEQ ID NO: 2932 - RNA, 103 nt, synthetic construct; identical to SEQ ID NO: 1797
  source 1..103: mol_type = other RNA
  modified_base 1: mod_base = OTHER; note = 2'-O-Methyl-cytidine phosphorothioate
  modified_base 2: mod_base = OTHER; note = 2'-O-Methyl-adenosine phosphorothioate
  modified_base 3: mod_base = OTHER; note = 2'-O-Methyl-guanosine
  modified_base 21: mod_base = OTHER; note = 2'-O-Methyl-guanosine
  modified_base 25: mod_base = OTHER; note = uridine phosphorothioate
  modified_base 28: mod_base = OTHER; note = 2'-O-Methyl-adenosine
  modified_base 29: mod_base = OTHER; note = 2'-O-Methyl-guanosine
  modified_base 30: mod_base = OTHER; note = 2'-O-Methyl-cytidine
  modified_base 31: mod_base = OTHER; note = 2'-O-Methyl-uridine
  modified_base 32: mod_base = OTHER; note = 2'-O-Methyl-adenosine
  modified_base 33: mod_base = OTHER; note = 2'-O-Methyl-guanosine
  modified_base 34: mod_base = OTHER; note = 2'-O-Methyl-adenosine
  modified_base 35: mod_base = OTHER; note = 2'-O-Methyl-adenosine
  modified_base 36: mod_base = OTHER; note = 2'-O-Methyl-adenosine
  modified_base 37: mod_base = OTHER; note = 2'-O-Methyl-uridine
  modified_base 38: mod_base = OTHER; note = 2'-O-Methyl-adenosine
  modified_base 39: mod_base = OTHER; note = 2'-O-Methyl-guanosine
  modified_base 40: mod_base = OTHER; note = 2'-O-Methyl-cytidine
  modified_base 41: mod_base = OTHER; note = 2'-O-Methyl-adenosine
  modified_base 42: mod_base = OTHER; note = 2'-O-Methyl-adenosine
  modified_base 45: mod_base = OTHER; note = uridine phosphorothioate
  modified_base 46: mod_base = OTHER; note = 2'-O-Methyl-adenosine
  modified_base 48: mod_base = OTHER; note = 2'-O-Methyl-adenosine
  modified_base 50: mod_base = OTHER; note = 2'-O-Methyl-uridine
  modified_base 52: mod_base = OTHER; note = 2'-O-Methyl-adenosine
  modified_base 53: mod_base = OTHER; note = 2'-O-Methyl-guanosine
  modified_base 54: mod_base = OTHER; note = 2'-O-Methyl-guanosine
  modified_base 57: mod_base = OTHER; note = 2'-O-Methyl-adenosine
  modified_base 61: mod_base = OTHER; note = 2'-O-Methyl-cytidine
  modified_base 64: mod_base = OTHER; note = uridine phosphorothioate
  modified_base 66: mod_base = OTHER; note = 2'-O-Methyl-uridine
  modified_base 67: mod_base = OTHER; note = 2'-O-Methyl-cytidine
  modified_base 70: mod_base = OTHER; note = 2'-O-Methyl-cytidine
  modified_base 71: mod_base = OTHER; note = 2'-O-Methyl-uridine
  modified_base 72: mod_base = OTHER; note = 2'-O-Methyl-uridine
  modified_base 73: mod_base = OTHER; note = 2'-O-Methyl-guanosine
  modified_base 74: mod_base = OTHER; note = 2'-O-Methyl-adenosine
  modified_base 75: mod_base = OTHER; note = 2'-O-Methyl-adenosine
  modified_base 76: mod_base = OTHER; note = 2'-O-Methyl-adenosine
  modified_base 77: mod_base = OTHER; note = 2'-O-Methyl-adenosine
  modified_base 78: mod_base = OTHER; note = 2'-O-Methyl-adenosine
  modified_base 79: mod_base = OTHER; note = 2'-O-Methyl-guanosine
  modified_base 80: mod_base = OTHER; note = 2'-O-Methyl-uridine
  modified_base 82: mod_base = OTHER; note = 2'-O-Methyl-guanosine
  modified_base 83: mod_base = OTHER; note = 2'-O-Methyl-cytidine
  modified_base 84: mod_base = OTHER; note = 2'-O-Methyl-adenosine
  modified_base 85: mod_base = OTHER; note = 2'-O-Methyl-cytidine
  modified_base 86: mod_base = OTHER; note = 2'-O-Methyl-cytidine
  modified_base 87: mod_base = OTHER; note = 2'-O-Methyl-guanosine
  modified_base 89: mod_base = OTHER; note = 2'-O-Methyl-guanosine
  modified_base 91: mod_base = OTHER; note = 2'-O-Methyl-cytidine
  modified_base 92: mod_base = OTHER; note = 2'-O-Methyl-guanosine
  modified_base 93: mod_base = OTHER; note = 2'-O-Methyl-guanosine
  modified_base 94: mod_base = OTHER; note = 2'-O-Methyl-uridine
  modified_base 95: mod_base = OTHER; note = 2'-O-Methyl-guanosine
  modified_base 96: mod_base = OTHER; note = 2'-O-Methyl-cytidine
  modified_base 97: mod_base = OTHER; note = 2'-O-Methyl-uridine phosphorothioate
  modified_base 98: mod_base = OTHER; note = 2'-O-Methyl-uridine phosphorothioate
  modified_base 99: mod_base = OTHER; note = 2'-O-Methyl-uridine phosphorothioate
  modified_base 100: mod_base = OTHER; note = 2'-O-Methyl-uridine
  misc_difference 101: note = a, c, g, inosine, u, deoxyadenosine, deoxyguanosine, deoxycytidine, deoxyinosine, thymine, ribonebularine, 2'-O-methylnebularine, or 2'-deoxynebularine
  misc_difference 102: note = a, c, g, inosine, u, deoxyadenosine, deoxyguanosine, deoxycytidine, deoxyinosine, thymine, ribonebularine, 2'-O-methylnebularine, or 2'-deoxynebularine
  misc_difference 103: note = a, c, g, inosine, u, deoxyadenosine, deoxyguanosine, deoxycytidine, deoxyinosine, thymine, ribonebularine, 2'-O-methylnebularine, or 2'-deoxynebularine

SEQ ID NO: 2933 - RNA, 103 nt, synthetic construct; identical to SEQ ID NO: 1797
  source 1..103: mol_type = other RNA
  modified_base 1: mod_base = OTHER; note = 2'-O-Methyl-cytidine phosphorothioate
  modified_base 2: mod_base = OTHER; note = 2'-O-Methyl-adenosine phosphorothioate
  modified_base 3: mod_base = OTHER; note = 2'-O-Methyl-guanosine
  modified_base 21: mod_base = OTHER; note = 2'-O-Methyl-guanosine
  modified_base 25: mod_base = OTHER; note = uridine phosphorothioate
  modified_base 28: mod_base = OTHER; note = 2'-O-Methyl-adenosine
  modified_base 29: mod_base = OTHER; note = 2'-O-Methyl-guanosine
  modified_base 30: mod_base = OTHER; note = 2'-O-Methyl-cytidine
  modified_base 31: mod_base = OTHER; note = 2'-O-Methyl-uridine
  modified_base 32: mod_base = OTHER; note = 2'-O-Methyl-adenosine
  modified_base 34: mod_base = OTHER; note = 2'-O-Methyl-adenosine
  modified_base 35: mod_base = OTHER; note = 2'-O-Methyl-adenosine
  modified_base 36: mod_base = OTHER; note = 2'-O-Methyl-adenosine
  modified_base 37: mod_base = OTHER; note = 2'-O-Methyl-uridine
  modified_base 38: mod_base = OTHER; note = 2'-O-Methyl-adenosine
  modified_base 39: mod_base = OTHER; note = 2'-O-Methyl-guanosine
  modified_base 40: mod_base = OTHER; note = 2'-O-Methyl-cytidine
  modified_base 41: mod_base = OTHER; note = 2'-O-Methyl-adenosine
  modified_base 42: mod_base = OTHER; note = 2'-O-Methyl-adenosine
  modified_base 45: mod_base = OTHER; note = uridine phosphorothioate
  modified_base 46: mod_base = OTHER; note = 2'-O-Methyl-adenosine
  modified_base 48: mod_base = OTHER; note = 2'-O-Methyl-adenosine
  modified_base 50: mod_base = OTHER; note = 2'-O-Methyl-uridine
  modified_base 52: mod_base = OTHER; note = 2'-O-Methyl-adenosine
  modified_base 53: mod_base = OTHER; note = 2'-O-Methyl-guanosine
  modified_base 54: mod_base = OTHER; note = 2'-O-Methyl-guanosine
  modified_base 57: mod_base = OTHER; note = 2'-O-Methyl-adenosine
  modified_base 61: mod_base = OTHER; note = 2'-O-Methyl-cytidine
  modified_base 64: mod_base = OTHER; note = uridine phosphorothioate
  modified_base 66: mod_base = OTHER; note = 2'-O-Methyl-uridine
  modified_base 67: mod_base = OTHER; note = 2'-O-Methyl-cytidine
  modified_base 70: mod_base = OTHER; note = 2'-O-Methyl-cytidine
  modified_base 71: mod_base = OTHER; note = 2'-O-Methyl-uridine
  modified_base 72: mod_base = OTHER; note = 2'-O-Methyl-uridine
  modified_base 73: mod_base = OTHER; note = 2'-O-Methyl-guanosine
  modified_base 74: mod_base = OTHER; note = 2'-O-Methyl-adenosine
  modified_base 75: mod_base = OTHER; note = 2'-O-Methyl-adenosine
  modified_base 76: mod_base = OTHER; note = 2'-O-Methyl-adenosine
  modified_base 77: mod_base = OTHER; note = 2'-O-Methyl-adenosine
  modified_base 78: mod_base = OTHER; note = 2'-O-Methyl-adenosine
  modified_base 79: mod_base = OTHER; note = 2'-O-Methyl-guanosine
  modified_base 80: mod_base = OTHER; note = 2'-O-Methyl-uridine
  modified_base 82: mod_base = OTHER; note = 2'-O-Methyl-guanosine
  modified_base 83: mod_base = OTHER; note = 2'-O-Methyl-cytidine
  modified_base 84: mod_base = OTHER; note = 2'-O-Methyl-adenosine
  modified_base 85: mod_base = OTHER; note = 2'-O-Methyl-cytidine
  modified_base 86: mod_base = OTHER; note = 2'-O-Methyl-cytidine
  modified_base 87: mod_base = OTHER; note = 2'-O-Methyl-guanosine
  modified_base 89: mod_base = OTHER; note = 2'-O-Methyl-guanosine
  modified_base 92: mod_base = OTHER; note = 2'-O-Methyl-guanosine
  modified_base 93: mod_base = OTHER; note = 2'-O-Methyl-guanosine
  modified_base 94: mod_base = OTHER; note = 2'-O-Methyl-uridine
  modified_base 95: mod_base = OTHER; note = 2'-O-Methyl-guanosine
  modified_base 96: mod_base = OTHER; note = 2'-O-Methyl-cytidine
  modified_base 97: mod_base = OTHER; note = 2'-O-Methyl-uridine phosphorothioate
  modified_base 98: mod_base = OTHER; note = 2'-O-Methyl-uridine phosphorothioate
  modified_base 99: mod_base = OTHER; note = 2'-O-Methyl-uridine phosphorothioate
  modified_base 100: mod_base = OTHER; note = 2'-O-Methyl-uridine
  misc_difference 101: note = a, c, g, inosine, u, deoxyadenosine, deoxyguanosine, deoxycytidine, deoxyinosine, thymine, ribonebularine, 2'-O-methylnebularine, or 2'-deoxynebularine
  misc_difference 102: note = a, c, g, inosine, u, deoxyadenosine, deoxyguanosine, deoxycytidine, deoxyinosine, thymine, ribonebularine, 2'-O-methylnebularine, or 2'-deoxynebularine
  misc_difference 103: note = a, c, g, inosine, u, deoxyadenosine, deoxyguanosine, deoxycytidine, deoxyinosine, thymine, ribonebularine, 2'-O-methylnebularine, or 2'-deoxynebularine

SEQ ID NO: 2934 - RNA, 103 nt, synthetic construct; identical to SEQ ID NO: 1797
  source 1..103: mol_type = other RNA
  modified_base 1: mod_base = OTHER; note = 2'-O-Methyl-cytidine phosphorothioate
  modified_base 2: mod_base = OTHER; note = 2'-O-Methyl-adenosine phosphorothioate
  modified_base 3: mod_base = OTHER; note = 2'-O-Methyl-guanosine
  modified_base 21: mod_base = OTHER; note = 2'-O-Methyl-guanosine
  modified_base 25: mod_base = OTHER; note = uridine phosphorothioate
  modified_base 28: mod_base = OTHER; note = 2'-O-Methyl-adenosine
  modified_base 29: mod_base = OTHER; note = 2'-O-Methyl-guanosine
  modified_base 30: mod_base = OTHER; note = 2'-O-Methyl-cytidine
  modified_base 31: mod_base = OTHER; note = 2'-O-Methyl-uridine
  modified_base 32: mod_base = OTHER; note = 2'-O-Methyl-adenosine
  modified_base 34: mod_base = OTHER; note = 2'-O-Methyl-adenosine
  modified_base 35: mod_base = OTHER; note = 2'-O-Methyl-adenosine
  modified_base 36: mod_base = OTHER; note = 2'-O-Methyl-adenosine
  modified_base 37: mod_base = OTHER; note = 2'-O-Methyl-uridine
  modified_base 38: mod_base = OTHER; note = 2'-O-Methyl-adenosine
  modified_base 39: mod_base = OTHER; note = 2'-O-Methyl-guanosine
  modified_base 40: mod_base = OTHER; note = 2'-O-Methyl-cytidine
  modified_base 41: mod_base = OTHER; note = 2'-O-Methyl-adenosine
  modified_base 42: mod_base = OTHER; note = 2'-O-Methyl-adenosine
  modified_base 45: mod_base = OTHER; note = uridine phosphorothioate
  modified_base 46: mod_base = OTHER; note = 2'-O-Methyl-adenosine
  modified_base 48: mod_base = OTHER; note = 2'-O-Methyl-adenosine
  modified_base 50: mod_base = OTHER; note = 2'-O-Methyl-uridine
  modified_base 52: mod_base = OTHER; note = 2'-O-Methyl-adenosine
  modified_base 53: mod_base = OTHER; note = 2'-O-Methyl-guanosine
  modified_base 54: mod_base = OTHER; note = 2'-O-Methyl-guanosine
  modified_base 57: mod_base = OTHER; note = 2'-O-Methyl-adenosine
  modified_base 61: mod_base = OTHER; note = 2'-O-Methyl-cytidine
  modified_base 64: mod_base = OTHER; note = uridine phosphorothioate
  modified_base 66: mod_base = OTHER; note = 2'-O-Methyl-uridine
  modified_base 67: mod_base = OTHER; note = 2'-O-Methyl-cytidine
  modified_base 70: mod_base = OTHER; note = 2'-O-Methyl-cytidine
  modified_base 71: mod_base = OTHER; note = 2'-O-Methyl-uridine
  modified_base 72: mod_base = OTHER; note = 2'-O-Methyl-uridine
  modified_base 73: mod_base = OTHER; note = 2'-O-Methyl-guanosine
  modified_base 74: mod_base = OTHER; note = 2'-O-Methyl-adenosine
  modified_base 75: mod_base = OTHER; note = 2'-O-Methyl-adenosine
  modified_base 76: mod_base = OTHER; note = 2'-O-Methyl-adenosine
  modified_base 77: mod_base = OTHER; note = 2'-O-Methyl-adenosine
  modified_base 78: mod_base = OTHER; note = 2'-O-Methyl-adenosine
  modified_base 79: mod_base = OTHER; note = 2'-O-Methyl-guanosine
  modified_base 80: mod_base = OTHER; note = 2'-O-Methyl-uridine
  modified_base 82: mod_base = OTHER; note = 2'-O-Methyl-guanosine
  modified_base 83: mod_base = OTHER; note = 2'-O-Methyl-cytidine
  modified_base 84: mod_base = OTHER; note = 2'-O-Methyl-adenosine
  modified_base 85: mod_base = OTHER; note = 2'-O-Methyl-cytidine
  modified_base 86: mod_base = OTHER; note = 2'-O-Methyl-cytidine
  modified_base 87: mod_base = OTHER; note = 2'-O-Methyl-guanosine
  modified_base 89: mod_base = OTHER; note = 2'-O-Methyl-guanosine
  modified_base 91: mod_base = OTHER; note = 2'-O-Methyl-cytidine
  modified_base 92: mod_base = OTHER; note = 2'-O-Methyl-guanosine
  modified_base 93: mod_base = OTHER; note = 2'-O-Methyl-guanosine
  modified_base 94: mod_base = OTHER; note = 2'-O-Methyl-uridine
  modified_base 95: mod_base = OTHER; note = 2'-O-Methyl-guanosine
  modified_base 96: mod_base = OTHER; note = 2'-O-Methyl-cytidine
  modified_base 97: mod_base = OTHER; note = 2'-O-Methyl-uridine phosphorothioate
  modified_base 98: mod_base = OTHER; note = 2'-O-Methyl-uridine phosphorothioate
  modified_base 99: mod_base = OTHER; note = 2'-O-Methyl-uridine phosphorothioate
  modified_base 100: mod_base = OTHER; note = 2'-O-Methyl-uridine
  misc_difference 101: note = a, c, g, inosine, u, deoxyadenosine, deoxyguanosine, deoxycytidine, deoxyinosine, thymine, ribonebularine, 2'-O-methylnebularine, or 2'-deoxynebularine
  misc_difference 102: note = a, c, g, inosine, u, deoxyadenosine, deoxyguanosine, deoxycytidine, deoxyinosine, thymine, ribonebularine, 2'-O-methylnebularine, or 2'-deoxynebularine
  misc_difference 103: note = a, c, g, inosine, u, deoxyadenosine, deoxyguanosine, deoxycytidine, deoxyinosine, thymine, ribonebularine, 2'-O-methylnebularine, or 2'-deoxynebularine

SEQ ID NO: 2935 - RNA, 103 nt, synthetic construct; identical to SEQ ID NO: 1797
  source 1..103: mol_type = other RNA
  modified_base 1: mod_base = OTHER; note = 2'-O-Methyl-cytidine phosphorothioate
  modified_base 2: mod_base = OTHER; note = 2'-O-Methyl-adenosine phosphorothioate
  modified_base 3: mod_base = OTHER; note = 2'-O-Methyl-guanosine
  modified_base 21: mod_base = OTHER; note = 2'-O-Methyl-guanosine
  modified_base 25: mod_base = OTHER; note = uridine phosphorothioate
  modified_base 28: mod_base = OTHER; note = 2'-O-Methyl-adenosine
  modified_base 29: mod_base = OTHER; note = 2'-O-Methyl-guanosine
  modified_base 30: mod_base = OTHER; note = 2'-O-Methyl-cytidine
  modified_base 31: mod_base = OTHER; note = 2'-O-Methyl-uridine
  modified_base 32: mod_base = OTHER; note = 2'-O-Methyl-adenosine
  modified_base 34: mod_base = OTHER; note = 2'-O-Methyl-adenosine
  modified_base 35: mod_base = OTHER; note = 2'-O-Methyl-adenosine
  modified_base 36: mod_base = OTHER; note = 2'-O-Methyl-adenosine
  modified_base 37: mod_base = OTHER; note = 2'-O-Methyl-uridine
  modified_base 38: mod_base = OTHER; note = 2'-O-Methyl-adenosine
  modified_base 39: mod_base = OTHER; note = 2'-O-Methyl-guanosine
  modified_base 40: mod_base = OTHER; note = 2'-O-Methyl-cytidine
  modified_base 41: mod_base = OTHER; note = 2'-O-Methyl-adenosine
  modified_base 42: mod_base = OTHER; note = 2'-O-Methyl-adenosine
  modified_base 45: mod_base = OTHER; note = uridine phosphorothioate
  modified_base 46: mod_base = OTHER; note = 2'-O-Methyl-adenosine
  modified_base 48: mod_base = OTHER; note = 2'-O-Methyl-adenosine
  modified_base 50: mod_base = OTHER; note = 2'-O-Methyl-uridine
  modified_base 52: mod_base = OTHER; note = 2'-O-Methyl-adenosine
  modified_base 53: mod_base = OTHER; note = 2'-O-Methyl-guanosine
  modified_base 54: mod_base = OTHER; note = 2'-O-Methyl-guanosine
  modified_base 55: mod_base = OTHER; note = 2'-O-Methyl-cytidine
  modified_base 56: mod_base = OTHER; note = 2'-O-Methyl-uridine
  modified_base 57: mod_base = OTHER; note = 2'-O-Methyl-adenosine
  modified_base 60: mod_base = OTHER; note = 2'-O-Methyl-cytidine
  modified_base 61: mod_base = OTHER; note = 2'-O-Methyl-cytidine
  modified_base 64: mod_base = OTHER; note = uridine phosphorothioate
  modified_base 66: mod_base = OTHER; note = 2'-O-Methyl-uridine
  modified_base 67: mod_base = OTHER; note = 2'-O-Methyl-cytidine
  modified_base 70: mod_base = OTHER; note = 2'-O-Methyl-cytidine
  modified_base 71: mod_base = OTHER; note = 2'-O-Methyl-uridine
  modified_base 72: mod_base = OTHER; note = 2'-O-Methyl-uridine
  modified_base 74: mod_base = OTHER; note = 2'-O-Methyl-adenosine
  modified_base 75: mod_base = OTHER; note = 2'-O-Methyl-adenosine
  modified_base 76: mod_base = OTHER; note = 2'-O-Methyl-adenosine
  modified_base 77: mod_base = OTHER; note = 2'-O-Methyl-adenosine
  modified_base 78: mod_base = OTHER; note = 2'-O-Methyl-adenosine
  modified_base 79: mod_base = OTHER; note = 2'-O-Methyl-guanosine
  modified_base 80: mod_base = OTHER; note = 2'-O-Methyl-uridine
  modified_base 82: mod_base = OTHER; note = 2'-O-Methyl-guanosine
  modified_base 83: mod_base = OTHER; note = 2'-O-Methyl-cytidine
  modified_base 84: mod_base = OTHER; note = 2'-O-Methyl-adenosine
  modified_base 85: mod_base = OTHER; note = 2'-O-Methyl-cytidine
  modified_base 86: mod_base = OTHER; note = 2'-O-Methyl-cytidine
  modified_base 87: mod_base = OTHER; note = 2'-O-Methyl-guanosine
  modified_base 89: mod_base = OTHER; note = 2'-O-Methyl-guanosine
  modified_base 92: mod_base = OTHER; note = 2'-O-Methyl-guanosine
  modified_base 93: mod_base = OTHER; note = 2'-O-Methyl-guanosine
  modified_base 94: mod_base = OTHER; note = 2'-O-Methyl-uridine
  modified_base 95: mod_base = OTHER; note = 2'-O-Methyl-guanosine
  modified_base 96: mod_base = OTHER; note = 2'-O-Methyl-cytidine
  modified_base 97: mod_base = OTHER; note = 2'-O-Methyl-uridine phosphorothioate
  modified_base 98: mod_base = OTHER; note = 2'-O-Methyl-uridine phosphorothioate
  modified_base 99: mod_base = OTHER; note = 2'-O-Methyl-uridine phosphorothioate
  modified_base 100: mod_base = OTHER; note = 2'-O-Methyl-uridine
  misc_difference 101: note = a, c, g, inosine, u, deoxyadenosine, deoxyguanosine, deoxycytidine, deoxyinosine, thymine, ribonebularine, 2'-O-methylnebularine, or 2'-deoxynebularine
  misc_difference 102: note = a, c, g, inosine, u, deoxyadenosine, deoxyguanosine, deoxycytidine, deoxyinosine, thymine, ribonebularine, 2'-O-methylnebularine, or 2'-deoxynebularine
  misc_difference 103: note = a, c, g, inosine, u, deoxyadenosine, deoxyguanosine, deoxycytidine, deoxyinosine, thymine, ribonebularine, 2'-O-methylnebularine, or 2'-deoxynebularine

SEQ ID NO: 2936 - RNA, 103 nt, synthetic construct; identical to SEQ ID NO: 1795
  source 1..103: mol_type = other RNA
  modified_base 1: mod_base = OTHER; note = 2'-O-Methyl-cytidine phosphorothioate
  modified_base 2: mod_base = OTHER; note = 2'-O-Methyl-cytidine phosphorothioate
  modified_base 3: mod_base = OTHER; note = 2'-O-Methyl-cytidine phosphorothioate
  modified_base 21: mod_base = OTHER; note = 2'-O-Methyl-guanosine
  modified_base 28: mod_base = OTHER; note = 2'-O-Methyl-adenosine
  modified_base 29: mod_base = OTHER; note = 2'-O-Methyl-guanosine
  modified_base 30: mod_base = OTHER; note = 2'-O-Methyl-cytidine
  modified_base 31: mod_base = OTHER; note = 2'-O-Methyl-uridine
  modified_base 32: mod_base = OTHER; note = 2'-O-Methyl-adenosine
  modified_base 33: mod_base = OTHER; note = 2'-O-Methyl-guanosine
  modified_base 34: mod_base = OTHER; note = 2'-O-Methyl-adenosine
  modified_base 35: mod_base = OTHER; note = 2'-O-Methyl-adenosine
  modified_base 36: mod_base = OTHER; note = 2'-O-Methyl-adenosine
  modified_base 37: mod_base = OTHER; note = 2'-O-Methyl-uridine
  modified_base 38: mod_base = OTHER; note = 2'-O-Methyl-adenosine
  modified_base 39: mod_base = OTHER; note = 2'-O-Methyl-guanosine
  modified_base 40: mod_base = OTHER; note = 2'-O-Methyl-cytidine
  modified_base 41: mod_base = OTHER; note = 2'-O-Methyl-adenosine
  modified_base 42: mod_base = OTHER; note = 2'-O-Methyl-adenosine
  modified_base 46: mod_base = OTHER; note = 2'-O-Methyl-adenosine
  modified_base 48: mod_base = OTHER; note = 2'-O-Methyl-adenosine
  modified_base 50: mod_base = OTHER; note = 2'-O-Methyl-uridine
  modified_base 52: mod_base = OTHER; note = 2'-O-Methyl-adenosine
  modified_base 53: mod_base = OTHER; note = 2'-O-Methyl-guanosine
  modified_base 54: mod_base = OTHER; note = 2'-O-Methyl-guanosine
  modified_base 55: mod_base = OTHER; note = 2'-O-Methyl-cytidine
  modified_base 56: mod_base = OTHER; note = 2'-O-Methyl-uridine
  modified_base 57: mod_base = OTHER; note = 2'-O-Methyl-adenosine
  modified_base 60: mod_base = OTHER; note = 2'-O-Methyl-cytidine
  modified_base 61: mod_base = OTHER; note = 2'-O-Methyl-cytidine
  modified_base 66: mod_base = OTHER; note = 2'-O-Methyl-uridine
  modified_base 67: mod_base = OTHER; note = 2'-O-Methyl-cytidine
  modified_base 70: mod_base = OTHER; note = 2'-O-Methyl-cytidine
  modified_base 71: mod_base = OTHER; note = 2'-O-Methyl-uridine
  modified_base 72: mod_base = OTHER; note = 2'-O-Methyl-uridine
  modified_base 73: mod_base = OTHER; note = 2'-O-Methyl-guanosine
  modified_base 74: mod_base = OTHER; note = 2'-O-Methyl-adenosine
  modified_base 75: mod_base = OTHER; note = 2'-O-Methyl-adenosine
  modified_base 76: mod_base = OTHER; note = 2'-O-Methyl-adenosine
  modified_base 77: mod_base = OTHER; note = 2'-O-Methyl-adenosine
  modified_base 78: mod_base = OTHER; note = 2'-O-Methyl-adenosine
  modified_base 79: mod_base = OTHER; note = 2'-O-Methyl-guanosine
  modified_base 80: mod_base = OTHER; note = 2'-O-Methyl-uridine
  modified_base 81: mod_base = OTHER; note = 2'-O-Methyl-guanosine
  modified_base 83: mod_base = OTHER; note = 2'-O-Methyl-cytidine
  modified_base 84: mod_base = OTHER; note = 2'-O-Methyl-adenosine
  modified_base 85: mod_base = OTHER; note = 2'-O-Methyl-cytidine
  modified_base 86: mod_base = OTHER; note = 2'-O-Methyl-cytidine
  modified_base 87: mod_base = OTHER; note = 2'-O-Methyl-guanosine
  modified_base 88: mod_base = OTHER; note = 2'-O-Methyl-adenosine
  modified_base 89: mod_base = OTHER; note = 2'-O-Methyl-guanosine
  modified_base 90: mod_base = OTHER; note = 2'-O-Methyl-uridine
  modified_base 91: mod_base = OTHER; note = 2'-O-Methyl-cytidine
  modified_base 92: mod_base = OTHER; note = 2'-O-Methyl-guanosine
  modified_base 93: mod_base = OTHER; note = 2'-O-Methyl-guanosine
  modified_base 94: mod_base = OTHER; note = 2'-O-Methyl-uridine
  modified_base 95: mod_base = OTHER; note = 2'-O-Methyl-guanosine
  modified_base 96: mod_base = OTHER; note = 2'-O-Methyl-cytidine
  modified_base 97: mod_base = OTHER; note = 2'-O-Methyl-uridine
  modified_base 98: mod_base = OTHER; note = 2'-O-Methyl-uridine phosphorothioate
  modified_base 99: mod_base = OTHER; note = 2'-O-Methyl-uridine phosphorothioate
  modified_base 100: mod_base = OTHER; note = 2'-O-Methyl-uridine
  misc_difference 101: note = a, c, g, inosine, u, deoxyadenosine, deoxyguanosine, deoxycytidine, deoxyinosine, thymine, ribonebularine, 2'-O-methylnebularine, or 2'-deoxynebularine
  misc_difference 102: note = a, c, g, inosine, u, deoxyadenosine, deoxyguanosine, deoxycytidine, deoxyinosine, thymine, ribonebularine, 2'-O-methylnebularine, or 2'-deoxynebularine
  misc_difference 103: note = a, c, g, inosine, u, deoxyadenosine, deoxyguanosine, deoxycytidine, deoxyinosine, thymine, ribonebularine, 2'-O-methylnebularine, or 2'-deoxynebularine

SEQ ID NO: 2937 - RNA, 103 nt, synthetic construct; identical to SEQ ID NO: 1795
  source 1..103: mol_type = other RNA
  modified_base 1: mod_base = OTHER; note = 2'-O-Methyl-cytidine phosphorothioate
  modified_base 2: mod_base = OTHER; note = 2'-O-Methyl-cytidine phosphorothioate
  modified_base 3: mod_base = OTHER; note = 2'-O-Methyl-cytidine phosphorothioate
  modified_base 21: mod_base = OTHER; note = 2'-O-Methyl-guanosine
  modified_base 28: mod_base = OTHER; note = 2'-O-Methyl-adenosine
  modified_base 29: mod_base = OTHER; note = 2'-O-Methyl-guanosine
  modified_base 30: mod_base = OTHER; note = 2'-O-Methyl-cytidine
  modified_base 31: mod_base = OTHER; note = 2'-O-Methyl-uridine
  modified_base 32: mod_base = OTHER; note = 2'-O-Methyl-adenosine
  modified_base 34: mod_base = OTHER; note = 2'-O-Methyl-adenosine
  modified_base 35: mod_base = OTHER; note = 2'-O-Methyl-adenosine
  modified_base 36: mod_base = OTHER; note = 2'-O-Methyl-adenosine
  modified_base 37: mod_base = OTHER; note = 2'-O-Methyl-uridine
  modified_base 38: mod_base = OTHER; note = 2'-O-Methyl-adenosine
  modified_base 39: mod_base = OTHER; note = 2'-O-Methyl-guanosine
  modified_base 40: mod_base = OTHER; note = 2'-O-Methyl-cytidine
  modified_base 41: mod_base = OTHER; note = 2'-O-Methyl-adenosine
  modified_base 42: mod_base = OTHER; note = 2'-O-Methyl-adenosine
  modified_base 46: mod_base = OTHER; note = 2'-O-Methyl-adenosine
  modified_base 48: mod_base = OTHER; note = 2'-O-Methyl-adenosine
  modified_base 50: mod_base = OTHER; note = 2'-O-Methyl-uridine
  modified_base 52: mod_base = OTHER; note = 2'-O-Methyl-adenosine
  modified_base 53: mod_base = OTHER; note = 2'-O-Methyl-guanosine
  modified_base 54: mod_base = OTHER; note = 2'-O-Methyl-guanosine
  modified_base 55: mod_base = OTHER; note = 2'-O-Methyl-cytidine
  modified_base 56: mod_base = OTHER; note = 2'-O-Methyl-uridine
  modified_base 57: mod_base = OTHER; note = 2'-O-Methyl-adenosine
  modified_base 60: mod_base = OTHER; note = 2'-O-Methyl-cytidine
  modified_base 61: mod_base = OTHER; note = 2'-O-Methyl-cytidine
  modified_base 66: mod_base = OTHER; note = 2'-O-Methyl-uridine
  modified_base 67: mod_base = OTHER; note = 2'-O-Methyl-cytidine
  modified_base 70: mod_base = OTHER; note = 2'-O-Methyl-cytidine
  modified_base 71: mod_base = OTHER; note = 2'-O-Methyl-uridine
  modified_base 72: mod_base = OTHER; note = 2'-O-Methyl-uridine
  modified_base 74: mod_base = OTHER; note = 2'-O-Methyl-adenosine
  modified_base 75: mod_base = OTHER; note = 2'-O-Methyl-adenosine
  modified_base 76: mod_base = OTHER; note = 2'-O-Methyl-adenosine
  modified_base 77: mod_base = OTHER; note = 2'-O-Methyl-adenosine
  modified_base 78: mod_base = OTHER; note = 2'-O-Methyl-adenosine
  modified_base 79: mod_base = OTHER; note = 2'-O-Methyl-guanosine
  modified_base 80: mod_base = OTHER; note = 2'-O-Methyl-uridine
  modified_base 81: mod_base = OTHER; note = 2'-O-Methyl-guanosine
  modified_base 83: mod_base = OTHER; note = 2'-O-Methyl-cytidine
  modified_base 84: mod_base = OTHER; note = 2'-O-Methyl-adenosine
  modified_base 85: mod_base = OTHER; note = 2'-O-Methyl-cytidine
  modified_base 86: mod_base = OTHER; note = 2'-O-Methyl-cytidine
  modified_base 87: mod_base = OTHER; note = 2'-O-Methyl-guanosine
  modified_base 88: mod_base = OTHER; note = 2'-O-Methyl-adenosine
  modified_base 89: mod_base = OTHER; note = 2'-O-Methyl-guanosine
  modified_base 90: mod_base = OTHER; note = 2'-O-Methyl-uridine
  modified_base 91: mod_base = OTHER; note = 2'-O-Methyl-cytidine
  modified_base 92: mod_base = OTHER; note = 2'-O-Methyl-guanosine
  modified_base 93: mod_base = OTHER; note = 2'-O-Methyl-guanosine
  modified_base 94: mod_base = OTHER; note = 2'-O-Methyl-uridine
  modified_base 95: mod_base = OTHER; note = 2'-O-Methyl-guanosine
  modified_base 96: mod_base = OTHER; note = 2'-O-Methyl-cytidine
  modified_base 97: mod_base = OTHER; note = 2'-O-Methyl-uridine
  modified_base 98: mod_base = OTHER; note = 2'-O-Methyl-uridine phosphorothioate
  modified_base 99: mod_base = OTHER; note = 2'-O-Methyl-uridine phosphorothioate
  modified_base 100: mod_base = OTHER; note = 2'-O-Methyl-uridine
  misc_difference 101: note = a, c, g, inosine, u, deoxyadenosine, deoxyguanosine, deoxycytidine, deoxyinosine, thymine, ribonebularine, 2'-O-methylnebularine, or 2'-deoxynebularine
  misc_difference 102: note = a, c, g, inosine, u, deoxyadenosine, deoxyguanosine, deoxycytidine, deoxyinosine, thymine, ribonebularine, 2'-O-methylnebularine, or 2'-deoxynebularine
  misc_difference 103: note = a, c, g, inosine, u, deoxyadenosine, deoxyguanosine, deoxycytidine, deoxyinosine, thymine, ribonebularine, 2'-O-methylnebularine, or 2'-deoxynebularine

SEQ ID NO: 2938 - RNA, 103 nt, synthetic construct; identical to SEQ ID NO: 1796
  source 1..103: mol_type = other RNA
  modified_base 1: mod_base = OTHER; note = 2'-O-Methyl-guanosine phosphorothioate
  modified_base 2: mod_base = OTHER; note = 2'-O-Methyl-adenosine phosphorothioate
  modified_base 3: mod_base = OTHER; note = 2'-O-Methyl-guanosine phosphorothioate
  modified_base 21: mod_base = OTHER; note = 2'-O-Methyl-guanosine
  modified_base 28: mod_base = OTHER; note = 2'-O-Methyl-adenosine
  modified_base 29: mod_base = OTHER; note = 2'-O-Methyl-guanosine
  modified_base 30: mod_base = OTHER; note = 2'-O-Methyl-cytidine
  modified_base 31: mod_base = OTHER; note = 2'-O-Methyl-uridine
  modified_base 32: mod_base = OTHER; note = 2'-O-Methyl-adenosine
  modified_base 33: mod_base = OTHER; note = 2'-O-Methyl-guanosine
  modified_base 34: mod_base = OTHER; note = 2'-O-Methyl-adenosine
  modified_base 35: mod_base = OTHER; note = 2'-O-Methyl-adenosine
  modified_base 36: mod_base = OTHER; note = 2'-O-Methyl-adenosine
  modified_base 37: mod_base = OTHER; note = 2'-O-Methyl-uridine
  modified_base 38: mod_base = OTHER; note = 2'-O-Methyl-adenosine
  modified_base 39: mod_base = OTHER; note = 2'-O-Methyl-guanosine
  modified_base 40: mod_base = OTHER; note = 2'-O-Methyl-cytidine
  modified_base 41: mod_base = OTHER; note = 2'-O-Methyl-adenosine
  modified_base 42: mod_base = OTHER; note = 2'-O-Methyl-adenosine
  modified_base 46: mod_base = OTHER; note = 2'-O-Methyl-adenosine
  modified_base 48: mod_base = OTHER; note = 2'-O-Methyl-adenosine
  modified_base 50: mod_base = OTHER; note = 2'-O-Methyl-uridine
  modified_base 52: mod_base = OTHER; note = 2'-O-Methyl-adenosine
  modified_base 53: mod_base = OTHER; note = 2'-O-Methyl-guanosine
  modified_base 54: mod_base = OTHER; note = 2'-O-Methyl-guanosine
  modified_base 55: mod_base = OTHER; note = 2'-O-Methyl-cytidine
  modified_base 56: mod_base = OTHER; note = 2'-O-Methyl-uridine
  modified_base 57: mod_base = OTHER; note = 2'-O-Methyl-adenosine
  modified_base 60: mod_base = OTHER; note = 2'-O-Methyl-cytidine
  modified_base 61: mod_base = OTHER; note = 2'-O-Methyl-cytidine
  modified_base 66: mod_base = OTHER; note = 2'-O-Methyl-uridine
  modified_base 67: mod_base = OTHER; note = 2'-O-Methyl-cytidine
  modified_base 70: mod_base = OTHER; note = 2'-O-Methyl-cytidine
  modified_base 71: mod_base = OTHER; note = 2'-O-Methyl-uridine
  modified_base 72: mod_base = OTHER; note = 2'-O-Methyl-uridine
  modified_base 73: mod_base = OTHER; note = 2'-O-Methyl-guanosine
  modified_base 74: mod_base = OTHER; note = 2'-O-Methyl-adenosine
  modified_base 75: mod_base = OTHER; note = 2'-O-Methyl-adenosine
  modified_base 76: mod_base = OTHER; note = 2'-O-Methyl-adenosine
  modified_base 77: mod_base = OTHER; note = 2'-O-Methyl-adenosine
  modified_base 78: mod_base = OTHER; note = 2'-O-Methyl-adenosine
  modified_base 79: mod_base = OTHER; note = 2'-O-Methyl-guanosine
  modified_base 80: mod_base = OTHER; note = 2'-O-Methyl-uridine
  modified_base 81: mod_base = OTHER; note = 2'-O-Methyl-guanosine
  modified_base 83: mod_base = OTHER; note = 2'-O-Methyl-cytidine
  modified_base 84: mod_base = OTHER; note = 2'-O-Methyl-adenosine
  modified_base 85: mod_base = OTHER; note = 2'-O-Methyl-cytidine
  modified_base 86: mod_base = OTHER; note = 2'-O-Methyl-cytidine
  modified_base 87: mod_base = OTHER; note = 2'-O-Methyl-guanosine
  modified_base 88: mod_base = OTHER; note = 2'-O-Methyl-adenosine
  modified_base 89: mod_base = OTHER; note = 2'-O-Methyl-guanosine
  modified_base 90: mod_base = OTHER; note = 2'-O-Methyl-uridine
  modified_base 91: mod_base = OTHER; note = 2'-O-Methyl-cytidine
  modified_base 92: mod_base = OTHER; note = 2'-O-Methyl-guanosine
  modified_base 93: mod_base = OTHER; note = 2'-O-Methyl-guanosine
  modified_base 94: mod_base = OTHER; note = 2'-O-Methyl-uridine
  modified_base 95: mod_base = OTHER; note = 2'-O-Methyl-guanosine
  modified_base 96: mod_base = OTHER; note = 2'-O-Methyl-cytidine
  modified_base 97: mod_base = OTHER; note = 2'-O-Methyl-uridine
  modified_base 98: mod_base = OTHER; note = 2'-O-Methyl-uridine phosphorothioate
  modified_base 99: mod_base = OTHER; note = 2'-O-Methyl-uridine phosphorothioate
  modified_base 100: mod_base = OTHER; note = 2'-O-Methyl-uridine
  misc_difference 101: note = a, c, g, inosine, u, deoxyadenosine, deoxyguanosine, deoxycytidine, deoxyinosine, thymine, ribonebularine, 2'-O-methylnebularine, or 2'-deoxynebularine
  misc_difference 102: note = a, c, g, inosine, u, deoxyadenosine, deoxyguanosine, deoxycytidine, deoxyinosine, thymine, ribonebularine, 2'-O-methylnebularine, or 2'-deoxynebularine
  misc_difference 103: note = a, c, g, inosine, u, deoxyadenosine, deoxyguanosine, deoxycytidine, deoxyinosine, thymine, ribonebularine, 2'-O-methylnebularine, or 2'-deoxynebularine

SEQ ID NO: 2939 - RNA, 103 nt, synthetic construct; identical to SEQ ID NO: 1796
  source 1..103: mol_type = other RNA
  modified_base 1: mod_base = OTHER; note = 2'-O-Methyl-guanosine phosphorothioate
  modified_base 2: mod_base = OTHER; note = 2'-O-Methyl-adenosine phosphorothioate
  modified_base 3: mod_base = OTHER; note = 2'-O-Methyl-guanosine phosphorothioate
  modified_base 21: mod_base = OTHER; note = 2'-O-Methyl-guanosine
  modified_base 28: mod_base = OTHER; note = 2'-O-Methyl-adenosine
  modified_base 29: mod_base = OTHER; note = 2'-O-Methyl-guanosine
  modified_base 30: mod_base = OTHER; note = 2'-O-Methyl-cytidine
  modified_base 31: mod_base = OTHER; note = 2'-O-Methyl-uridine
  modified_base 32: mod_base = OTHER; note = 2'-O-Methyl-adenosine
  modified_base 34: mod_base = OTHER; note = 2'-O-Methyl-adenosine
  modified_base 35: mod_base = OTHER; note = 2'-O-Methyl-adenosine
  modified_base 36: mod_base = OTHER; note = 2'-O-Methyl-adenosine
  modified_base 37: mod_base = OTHER; note = 2'-O-Methyl-uridine
  modified_base 38: mod_base = OTHER; note = 2'-O-Methyl-adenosine
  modified_base 39: mod_base = OTHER; note = 2'-O-Methyl-guanosine
  modified_base 40: mod_base = OTHER; note = 2'-O-Methyl-cytidine
  modified_base 41: mod_base = OTHER; note = 2'-O-Methyl-adenosine
  modified_base 42: mod_base = OTHER; note = 2'-O-Methyl-adenosine
  modified_base 46: mod_base = OTHER; note = 2'-O-Methyl-adenosine
  modified_base 48: mod_base = OTHER; note = 2'-O-Methyl-adenosine
  modified_base 50: mod_base = OTHER; note = 2'-O-Methyl-uridine
  modified_base 52: mod_base = OTHER; note = 2'-O-Methyl-adenosine
  modified_base 53: mod_base = OTHER; note = 2'-O-Methyl-guanosine
  modified_base 54: mod_base = OTHER; note = 2'-O-Methyl-guanosine
  modified_base 55: mod_base = OTHER; note = 2'-O-Methyl-cytidine
  modified_base 56: mod_base = OTHER; note = 2'-O-Methyl-uridine
  modified_base 57: mod_base = OTHER; note = 2'-O-Methyl-adenosine
  modified_base 60: mod_base = OTHER; note = 2'-O-Methyl-cytidine
  modified_base 61: mod_base = OTHER; note = 2'-O-Methyl-cytidine
  modified_base 66: mod_base = OTHER; note = 2'-O-Methyl-uridine
  modified_base 67: mod_base = OTHER; note = 2'-O-Methyl-cytidine
  modified_base 70: mod_base = OTHER; note = 2'-O-Methyl-cytidine
  modified_base 71: mod_base = OTHER; note = 2'-O-Methyl-uridine
  modified_base 72: mod_base = OTHER; note = 2'-O-Methyl-uridine
  modified_base 74: mod_base = OTHER; note = 2'-O-Methyl-adenosine
  modified_base 75: mod_base = OTHER; note = 2'-O-Methyl-adenosine
  modified_base 76: mod_base = OTHER; note = 2'-O-Methyl-adenosine
  modified_base 77: mod_base = OTHER; note = 2'-O-Methyl-adenosine
  modified_base 78: mod_base = OTHER; note = 2'-O-Methyl-adenosine
  modified_base 79: mod_base = OTHER; note = 2'-O-Methyl-guanosine
  modified_base 80: mod_base = OTHER; note = 2'-O-Methyl-uridine
  modified_base 81: mod_base = OTHER; note = 2'-O-Methyl-guanosine
  modified_base 83: mod_base = OTHER; note = 2'-O-Methyl-cytidine
  modified_base 84: mod_base = OTHER; note = 2'-O-Methyl-adenosine
  modified_base 85: mod_base = OTHER; note = 2'-O-Methyl-cytidine
  modified_base 86: mod_base = OTHER; note = 2'-O-Methyl-cytidine
  modified_base 87: mod_base = OTHER; note = 2'-O-Methyl-guanosine
  modified_base 88: mod_base = OTHER; note = 2'-O-Methyl-adenosine
  modified_base 89: mod_base = OTHER; note = 2'-O-Methyl-guanosine
  modified_base 90: mod_base = OTHER; note = 2'-O-Methyl-uridine
  modified_base 91: mod_base = OTHER; note = 2'-O-Methyl-cytidine
  modified_base 92: mod_base = OTHER; note = 2'-O-Methyl-guanosine
  modified_base 93: mod_base = OTHER; note = 2'-O-Methyl-guanosine
  modified_base 94: mod_base = OTHER; note = 2'-O-Methyl-uridine
  modified_base 95: mod_base = OTHER; note = 2'-O-Methyl-guanosine
  modified_base 96: mod_base = OTHER; note = 2'-O-Methyl-cytidine
  modified_base 97: mod_base = OTHER; note = 2'-O-Methyl-uridine
  modified_base 98: mod_base = OTHER; note = 2'-O-Methyl-uridine phosphorothioate
  modified_base 99: mod_base = OTHER; note = 2'-O-Methyl-uridine phosphorothioate
  modified_base 100: mod_base = OTHER; note = 2'-O-Methyl-uridine
  misc_difference 101: note = a, c, g, inosine, u, deoxyadenosine, deoxyguanosine, deoxycytidine, deoxyinosine, thymine, ribonebularine, 2'-O-methylnebularine, or 2'-deoxynebularine
  misc_difference 102: note = a, c, g, inosine, u, deoxyadenosine, deoxyguanosine, deoxycytidine, deoxyinosine, thymine, ribonebularine, 2'-O-methylnebularine, or 2'-deoxynebularine
  misc_difference 103: note = a, c, g, inosine, u, deoxyadenosine, deoxyguanosine, deoxycytidine, deoxyinosine, thymine, ribonebularine, 2'-O-methylnebularine, or 2'-deoxynebularine

SEQ ID NO: 2940 - RNA, 103 nt, synthetic construct; identical to SEQ ID NO: 1797
  source 1..103: mol_type = other RNA
  modified_base 1: mod_base = OTHER; note = 2'-O-Methyl-cytidine phosphorothioate
  modified_base 2: mod_base = OTHER; note = 2'-O-Methyl-adenosine phosphorothioate
  modified_base 3: mod_base = OTHER; note = 2'-O-Methyl-guanosine phosphorothioate
  modified_base 21: mod_base = OTHER; note = 2'-O-Methyl-guanosine
  modified_base 28: mod_base = OTHER; note = 2'-O-Methyl-adenosine
  modified_base 29: mod_base = OTHER; note = 2'-O-Methyl-guanosine
  modified_base 30: mod_base = OTHER; note = 2'-O-Methyl-cytidine
  modified_base 31: mod_base = OTHER; note = 2'-O-Methyl-uridine
  modified_base 32: mod_base = OTHER; note = 2'-O-Methyl-adenosine
  modified_base 34: mod_base = OTHER; note = 2'-O-Methyl-adenosine
  modified_base 35: mod_base = OTHER; note = 2'-O-Methyl-adenosine
  modified_base 36: mod_base = OTHER; note = 2'-O-Methyl-adenosine
  modified_base 37: mod_base = OTHER; note = 2'-O-Methyl-uridine
  modified_base 38: mod_base = OTHER; note = 2'-O-Methyl-adenosine
  modified_base 39: mod_base = OTHER; note = 2'-O-Methyl-guanosine
  modified_base 40: mod_base = OTHER; note = 2'-O-Methyl-cytidine
  modified_base 41: mod_base = OTHER; note = 2'-O-Methyl-adenosine
  modified_base 42: mod_base = OTHER; note = 2'-O-Methyl-adenosine
  modified_base 46: mod_base = OTHER; note = 2'-O-Methyl-adenosine
  modified_base 48: mod_base = OTHER; note = 2'-O-Methyl-adenosine
  modified_base 50: mod_base = OTHER; note = 2'-O-Methyl-uridine
  modified_base 52: mod_base = OTHER; note = 2'-O-Methyl-adenosine
  modified_base 53: mod_base = OTHER; note = 2'-O-Methyl-guanosine
  modified_base 54: mod_base = OTHER; note = 2'-O-Methyl-guanosine
  modified_base 55: mod_base = OTHER; note = 2'-O-Methyl-cytidine
  modified_base 56: mod_base = OTHER; note = 2'-O-Methyl-uridine
  modified_base 57: mod_base = OTHER; note = 2'-O-Methyl-adenosine
  modified_base 60: mod_base = OTHER; note = 2'-O-Methyl-cytidine
  modified_base 61: mod_base = OTHER; note = 2'-O-Methyl-cytidine
  modified_base 66: mod_base = OTHER; note = 2'-O-Methyl-uridine
  modified_base 67: mod_base = OTHER; note = 2'-O-Methyl-cytidine
  modified_base 70: mod_base = OTHER; note = 2'-O-Methyl-cytidine
  modified_base 71: mod_base = OTHER; note = 2'-O-Methyl-uridine
  modified_base 72: mod_base = OTHER; note = 2'-O-Methyl-uridine
  modified_base 74: mod_base = OTHER; note = 2'-O-Methyl-adenosine
  modified_base 75: mod_base = OTHER; note = 2'-O-Methyl-adenosine
  modified_base 76: mod_base = OTHER; note = 2'-O-Methyl-adenosine
  modified_base 77: mod_base = OTHER; note = 2'-O-Methyl-adenosine
  modified_base 78: mod_base = OTHER; note = 2'-O-Methyl-adenosine
  modified_base 79: mod_base = OTHER; note = 2'-O-Methyl-guanosine
  modified_base 80: mod_base = OTHER; note = 2'-O-Methyl-uridine
  modified_base 81: mod_base = OTHER; note = 2'-O-Methyl-guanosine
  modified_base 83: mod_base = OTHER; note = 2'-O-Methyl-cytidine
  modified_base 84: mod_base = OTHER; note = 2'-O-Methyl-adenosine
  modified_base 85: mod_base = OTHER; note = 2'-O-Methyl-cytidine
  modified_base 86: mod_base = OTHER; note = 2'-O-Methyl-cytidine
  modified_base 87: mod_base = OTHER; note = 2'-O-Methyl-guanosine
  modified_base 88: mod_base = OTHER; note = 2'-O-Methyl-adenosine
  modified_base 89: mod_base = OTHER; note = 2'-O-Methyl-guanosine
  modified_base 90: mod_base = OTHER; note = 2'-O-Methyl-uridine
  modified_base 91: mod_base = OTHER; note = 2'-O-Methyl-cytidine
  modified_base 92: mod_base = OTHER; note = 2'-O-Methyl-guanosine
  modified_base 93: mod_base = OTHER; note = 2'-O-Methyl-guanosine
  modified_base 94: mod_base = OTHER; note = 2'-O-Methyl-uridine
  modified_base 95: mod_base = OTHER; note = 2'-O-Methyl-guanosine
  modified_base 96: mod_base = OTHER; note = 2'-O-Methyl-cytidine
  modified_base 97: mod_base = OTHER; note = 2'-O-Methyl-uridine
  modified_base 98: mod_base = OTHER; note = 2'-O-Methyl-uridine phosphorothioate
  modified_base 99: mod_base = OTHER; note = 2'-O-Methyl-uridine phosphorothioate
  modified_base 100: mod_base = OTHER; note = 2'-O-Methyl-uridine
  misc_difference 101: note = a, c, g, inosine, u, deoxyadenosine, deoxyguanosine, deoxycytidine, deoxyinosine, thymine, ribonebularine, 2'-O-methylnebularine, or 2'-deoxynebularine
  misc_difference 102: note = a, c, g, inosine, u, deoxyadenosine, deoxyguanosine, deoxycytidine, deoxyinosine, thymine, ribonebularine, 2'-O-methylnebularine, or 2'-deoxynebularine
  misc_difference 103: note = a, c, g, inosine, u, deoxyadenosine, deoxyguanosine, deoxycytidine, deoxyinosine, thymine, ribonebularine, 2'-O-methylnebularine, or 2'-deoxynebularine

SEQ ID NO: 2941 - RNA, 103 nt, synthetic construct; identical to SEQ ID NO: 1797
  source 1..103: mol_type = other RNA
  modified_base 1: mod_base = OTHER; note = 2'-O-Methyl-cytidine phosphorothioate
  modified_base 2: mod_base = OTHER; note = 2'-O-Methyl-adenosine phosphorothioate
  modified_base 3: mod_base = OTHER; note = 2'-O-Methyl-guanosine phosphorothioate
  modified_base 21: mod_base = OTHER; note = 2'-O-Methyl-guanosine
  modified_base 28: mod_base = OTHER; note = 2'-O-Methyl-adenosine
  modified_base 29: mod_base = OTHER; note = 2'-O-Methyl-guanosine
  modified_base 30: mod_base = OTHER; note = 2'-O-Methyl-cytidine
  modified_base 31: mod_base = OTHER; note = 2'-O-Methyl-uridine
  modified_base 32: mod_base = OTHER; note = 2'-O-Methyl-adenosine
  modified_base 33: mod_base = OTHER; note = 2'-O-Methyl-guanosine
  modified_base 34: mod_base = OTHER; note = 2'-O-Methyl-adenosine
  modified_base 35: mod_base = OTHER; note = 2'-O-Methyl-adenosine
  modified_base 36: mod_base = OTHER; note = 2'-O-Methyl-adenosine
  modified_base 37: mod_base = OTHER; note = 2'-O-Methyl-uridine
  modified_base 38: mod_base = OTHER; note = 2'-O-Methyl-adenosine
  modified_base 39: mod_base = OTHER; note = 2'-O-Methyl-guanosine
  modified_base 40: mod_base = OTHER; note = 2'-O-Methyl-cytidine
  modified_base 41: mod_base = OTHER; note = 2'-O-Methyl-adenosine
  modified_base 42: mod_base = OTHER; note = 2'-O-Methyl-adenosine
  modified_base 46: mod_base = OTHER; note = 2'-O-Methyl-adenosine
  modified_base 48: mod_base = OTHER; note = 2'-O-Methyl-adenosine
  modified_base 50: mod_base = OTHER; note = 2'-O-Methyl-uridine
  modified_base 52: mod_base = OTHER; note = 2'-O-Methyl-adenosine
  modified_base 53: mod_base = OTHER; note = 2'-O-Methyl-guanosine
  modified_base 54: mod_base = OTHER; note = 2'-O-Methyl-guanosine
  modified_base 57: mod_base = OTHER; note = 2'-O-Methyl-adenosine
  modified_base 61: mod_base = OTHER; note = 2'-O-Methyl-cytidine
  modified_base 66: mod_base = OTHER; note = 2'-O-Methyl-uridine
  modified_base 67: mod_base = OTHER; note = 2'-O-Methyl-cytidine
  modified_base 70: mod_base = OTHER; note = 2'-O-Methyl-cytidine
  modified_base 71: mod_base = OTHER; note = 2'-O-Methyl-uridine
  modified_base 72: mod_base = OTHER; note = 2'-O-Methyl-uridine
  modified_base 74: mod_base = OTHER; note = 2'-O-Methyl-adenosine
  modified_base 75: mod_base = OTHER; note = 2'-O-Methyl-adenosine
  modified_base 76: mod_base = OTHER; note = 2'-O-Methyl-adenosine
  modified_base 77: mod_base = OTHER; note = 2'-O-Methyl-adenosine
  modified_base 78: mod_base = OTHER; note = 2'-O-Methyl-adenosine
  modified_base 79: mod_base = OTHER; note = 2'-O-Methyl-guanosine
  modified_base 80: mod_base = OTHER; note = 2'-O-Methyl-uridine
  modified_base 82: mod_base = OTHER; note = 2'-O-Methyl-guanosine
  modified_base 83: mod_base = OTHER; note = 2'-O-Methyl-cytidine
  modified_base 84: mod_base = OTHER; note = 2'-O-Methyl-adenosine
  modified_base 85: mod_base = OTHER; note = 2'-O-Methyl-cytidine
  modified_base 86: mod_base = OTHER; note = 2'-O-Methyl-cytidine
  modified_base 87: mod_base = OTHER; note = 2'-O-Methyl-guanosine
  modified_base 89: mod_base = OTHER; note = 2'-O-Methyl-guanosine
  modified_base 92: mod_base = OTHER; note = 2'-O-Methyl-guanosine
  modified_base 93: mod_base = OTHER; note = 2'-O-Methyl-guanosine
  modified_base 94: mod_base = OTHER; note = 2'-O-Methyl-uridine
  modified_base 95: mod_base = OTHER; note = 2'-O-Methyl-guanosine
  modified_base 96: mod_base = OTHER; note = 2'-O-Methyl-cytidine
  modified_base 97: mod_base = OTHER; note = 2'-O-Methyl-uridine
  modified_base 98: mod_base = OTHER; note = 2'-O-Methyl-uridine phosphorothioate
  modified_base 99: mod_base = OTHER; note = 2'-O-Methyl-uridine phosphorothioate
  modified_base 100: mod_base = OTHER; note = 2'-O-Methyl-uridine
  misc_difference 101: note = a, c, g, inosine, u, deoxyadenosine, deoxyguanosine, deoxycytidine, deoxyinosine, thymine, ribonebularine, 2'-O-methylnebularine, or 2'-deoxynebularine
  misc_difference 102: note = a, c, g, inosine, u, deoxyadenosine, deoxyguanosine, deoxycytidine, deoxyinosine, thymine, ribonebularine, 2'-O-methylnebularine, or 2'-deoxynebularine
  misc_difference 103: note = a, c, g, inosine, u, deoxyadenosine, deoxyguanosine, deoxycytidine, deoxyinosine, thymine, ribonebularine, 2'-O-methylnebularine, or 2'-deoxynebularine

SEQ ID NO: 2942 - RNA, 103 nt, synthetic construct; identical to SEQ ID NO: 1797
  source 1..103: mol_type = other RNA
  modified_base 1: mod_base = OTHER; note = 2'-O-Methyl-cytidine phosphorothioate
  modified_base 2: mod_base = OTHER; note = 2'-O-Methyl-adenosine phosphorothioate
  modified_base 3: mod_base = OTHER; note = 2'-O-Methyl-guanosine phosphorothioate
  modified_base 21: mod_base = OTHER; note = 2'-O-Methyl-guanosine
  modified_base 28: mod_base = OTHER; note = 2'-O-Methyl-adenosine
  modified_base 29: mod_base = OTHER; note = 2'-O-Methyl-guanosine
  modified_base 30: mod_base = OTHER; note = 2'-O-Methyl-cytidine
  modified_base 31: mod_base = OTHER; note = 2'-O-Methyl-uridine
  modified_base 32: mod_base = OTHER; note = 2'-O-Methyl-adenosine
  modified_base 33: mod_base = OTHER; note = 2'-O-Methyl-guanosine
  modified_base 34: mod_base = OTHER; note = 2'-O-Methyl-adenosine
  modified_base 35: mod_base = OTHER; note = 2'-O-Methyl-adenosine
  modified_base 36: mod_base = OTHER; note = 2'-O-Methyl-adenosine
  modified_base 37: mod_base = OTHER; note = 2'-O-Methyl-uridine
  modified_base 38: mod_base = OTHER; note = 2'-O-Methyl-adenosine
  modified_base 39: mod_base = OTHER; note = 2'-O-Methyl-guanosine
  modified_base 40: mod_base = OTHER; note = 2'-O-Methyl-cytidine
  modified_base 41: mod_base = OTHER; note = 2'-O-Methyl-adenosine
  modified_base 42: mod_base = OTHER; note = 2'-O-Methyl-adenosine
  modified_base 46: mod_base = OTHER; note = 2'-O-Methyl-adenosine
  modified_base 48: mod_base = OTHER; note = 2'-O-Methyl-adenosine
  modified_base 50: mod_base = OTHER; note = 2'-O-Methyl-uridine
  modified_base 52: mod_base = OTHER; note = 2'-O-Methyl-adenosine
  modified_base 53: mod_base = OTHER; note = 2'-O-Methyl-guanosine
  modified_base 54: mod_base = OTHER; note = 2'-O-Methyl-guanosine
  modified_base 55: mod_base = OTHER; note = 2'-O-Methyl-cytidine
  modified_base 56: mod_base = OTHER; note = 2'-O-Methyl-uridine
  modified_base 57: mod_base = OTHER; note = 2'-O-Methyl-adenosine
  modified_base 60: mod_base = OTHER; note = 2'-O-Methyl-cytidine
  modified_base 61: mod_base = OTHER; note = 2'-O-Methyl-cytidine
  modified_base 66: mod_base = OTHER; note = 2'-O-Methyl-uridine
  modified_base 67: mod_base = OTHER; note = 2'-O-Methyl-cytidine
  modified_base 70: mod_base = OTHER; note = 2'-O-Methyl-cytidine
  modified_base 71: mod_base = OTHER; note = 2'-O-Methyl-uridine
  modified_base 72: mod_base = OTHER; note = 2'-O-Methyl-uridine
  modified_base 74: mod_base = OTHER; note = 2'-O-Methyl-adenosine
  modified_base 75: mod_base = OTHER; note = 2'-O-Methyl-adenosine
  modified_base 76: mod_base = OTHER; note = 2'-O-Methyl-adenosine
  modified_base 77: mod_base = OTHER; note = 2'-O-Methyl-adenosine
  modified_base 78: mod_base = OTHER; note = 2'-O-Methyl-adenosine
  modified_base 79: mod_base = OTHER; note = 2'-O-Methyl-guanosine
  modified_base 80: mod_base = OTHER; note = 2'-O-Methyl-uridine
  modified_base 82: mod_base = OTHER; note = 2'-O-Methyl-guanosine
  modified_base 83: mod_base = OTHER; note = 2'-O-Methyl-cytidine
  modified_base 84: mod_base = OTHER; note = 2'-O-Methyl-adenosine
  modified_base 85: mod_base = OTHER; note = 2'-O-Methyl-cytidine
  modified_base 86: mod_base = OTHER; note = 2'-O-Methyl-cytidine
  modified_base 87: mod_base = OTHER; note = 2'-O-Methyl-guanosine
  modified_base 89: mod_base = OTHER; note = 2'-O-Methyl-guanosine
  modified_base 92: mod_base = OTHER; note = 2'-O-Methyl-guanosine
  modified_base 93: mod_base = OTHER; note = 2'-O-Methyl-guanosine
  modified_base 94: mod_base = OTHER; note = 2'-O-Methyl-uridine
  modified_base 95: mod_base = OTHER; note = 2'-O-Methyl-guanosine
  modified_base 96: mod_base = OTHER; note = 2'-O-Methyl-cytidine
  modified_base 97: mod_base = OTHER; note = 2'-O-Methyl-uridine
  modified_base 98: mod_base = OTHER; note = 2'-O-Methyl-uridine phosphorothioate
  modified_base 99: mod_base = OTHER; note = 2'-O-Methyl-uridine phosphorothioate
  modified_base 100: mod_base = OTHER; note = 2'-O-Methyl-uridine
  misc_difference 101: note = a, c, g, inosine, u, deoxyadenosine, deoxyguanosine, deoxycytidine, deoxyinosine, thymine, ribonebularine, 2'-O-methylnebularine, or 2'-deoxynebularine
  misc_difference 102: note = a, c, g, inosine, u, deoxyadenosine, deoxyguanosine, deoxycytidine, deoxyinosine, thymine, ribonebularine, 2'-O-methylnebularine, or 2'-deoxynebularine
  misc_difference 103: note = a, c, g, inosine, u, deoxyadenosine, deoxyguanosine, deoxycytidine, deoxyinosine, thymine, ribonebularine, 2'-O-methylnebularine, or 2'-deoxynebularine

SEQ ID NO: 2943 - RNA, 103 nt, synthetic construct; identical to SEQ ID NO: 1797
  source 1..103: mol_type = other RNA
  modified_base 1: mod_base = OTHER; note = 2'-O-Methyl-cytidine phosphorothioate
  modified_base 2: mod_base = OTHER; note = 2'-O-Methyl-adenosine phosphorothioate
  modified_base 3: mod_base = OTHER; note = 2'-O-Methyl-guanosine phosphorothioate
  modified_base 21: mod_base = OTHER; note = 2'-O-Methyl-guanosine
  modified_base 28: mod_base = OTHER; note = 2'-O-Methyl-adenosine
  modified_base 29: mod_base = OTHER; note = 2'-O-Methyl-guanosine
  modified_base 30: mod_base = OTHER; note = 2'-O-Methyl-cytidine
  modified_base 31: mod_base = OTHER; note = 2'-O-Methyl-uridine
  modified_base 32: mod_base = OTHER; note = 2'-O-Methyl-adenosine
  modified_base 33: mod_base = OTHER; note = 2'-O-Methyl-guanosine
  modified_base 34: mod_base = OTHER; note = 2'-O-Methyl-adenosine
  modified_base 35: mod_base = OTHER; note = 2'-O-Methyl-adenosine
  modified_base 36: mod_base = OTHER; note = 2'-O-Methyl-adenosine
  modified_base 37: mod_base = OTHER; note = 2'-O-Methyl-uridine
  modified_base 38: mod_base = OTHER; note = 2'-O-Methyl-adenosine
  modified_base 39: mod_base = OTHER; note = 2'-O-Methyl-guanosine
  modified_base 40: mod_base = OTHER; note = 2'-O-Methyl-cytidine
  modified_base 41: mod_base = OTHER; note = 2'-O-Methyl-adenosine
  modified_base 42: mod_base = OTHER; note = 2'-O-Methyl-adenosine
  modified_base 46: mod_base = OTHER; note = 2'-O-Methyl-adenosine
  modified_base 48: mod_base = OTHER; note = 2'-O-Methyl-adenosine
  modified_base 50: mod_base = OTHER; note = 2'-O-Methyl-uridine
  modified_base 52: mod_base = OTHER; note = 2'-O-Methyl-adenosine
  modified_base 53: mod_base = OTHER; note = 2'-O-Methyl-guanosine
  modified_base 54: mod_base = OTHER; note = 2'-O-Methyl-guanosine
  modified_base 57: mod_base = OTHER; note = 2'-O-Methyl-adenosine
  modified_base 61: mod_base = OTHER; note = 2'-O-Methyl-cytidine
  modified_base 66: mod_base = OTHER; note = 2'-O-Methyl-uridine
  modified_base 67: mod_base = OTHER; note = 2'-O-Methyl-cytidine
  modified_base 70: mod_base = OTHER; note = 2'-O-Methyl-cytidine
  modified_base 71: mod_base = OTHER; note = 2'-O-Methyl-uridine
  modified_base 72: mod_base = OTHER; note = 2'-O-Methyl-uridine
  modified_base 73: mod_base = OTHER; note = 2'-O-Methyl-guanosine
  modified_base 74: mod_base = OTHER; note = 2'-O-Methyl-adenosine
  modified_base 75: mod_base = OTHER; note = 2'-O-Methyl-adenosine
  modified_base 76: mod_base = OTHER; note = 2'-O-Methyl-adenosine
  modified_base 77: mod_base = OTHER; note = 2'-O-Methyl-adenosine
  modified_base 78: mod_base = OTHER; note = 2'-O-Methyl-adenosine
  modified_base 79: mod_base = OTHER; note = 2'-O-Methyl-guanosine
  modified_base 80: mod_base = OTHER; note = 2'-O-Methyl-uridine
  modified_base 82: mod_base = OTHER; note = 2'-O-Methyl-guanosine
  modified_base 83: mod_base = OTHER; note = 2'-O-Methyl-cytidine
  modified_base 84: mod_base = OTHER; note = 2'-O-Methyl-adenosine
  modified_base 85: mod_base = OTHER; note = 2'-O-Methyl-cytidine
  modified_base 86: mod_base = OTHER; note = 2'-O-Methyl-cytidine
  modified_base 87: mod_base = OTHER; note = 2'-O-Methyl-guanosine
  modified_base 89: mod_base = OTHER; note = 2'-O-Methyl-guanosine
  modified_base 92: mod_base = OTHER; note = 2'-O-Methyl-guanosine
  modified_base 93: mod_base = OTHER; note = 2'-O-Methyl-guanosine
  modified_base 94: mod_base = OTHER; note = 2'-O-Methyl-uridine
  modified_base 95: mod_base = OTHER; note = 2'-O-Methyl-guanosine
  modified_base 96: mod_base = OTHER; note = 2'-O-Methyl-cytidine
  modified_base 97: mod_base = OTHER; note = 2'-O-Methyl-uridine
  modified_base 98: mod_base = OTHER; note = 2'-O-Methyl-uridine phosphorothioate
  modified_base 99: mod_base = OTHER; note = 2'-O-Methyl-uridine phosphorothioate
  modified_base 100: mod_base = OTHER; note = 2'-O-Methyl-uridine
  misc_difference 101: note = a, c, g, inosine, u, deoxyadenosine, deoxyguanosine, deoxycytidine, deoxyinosine, thymine, ribonebularine, 2'-O-methylnebularine, or 2'-deoxynebularine
  misc_difference 102: note = a, c, g, inosine, u, deoxyadenosine, deoxyguanosine, deoxycytidine, deoxyinosine, thymine, ribonebularine, 2'-O-methylnebularine, or 2'-deoxynebularine
  misc_difference 103: note = a, c, g, inosine, u, deoxyadenosine, deoxyguanosine, deoxycytidine, deoxyinosine, thymine, ribonebularine, 2'-O-methylnebularine, or 2'-deoxynebularine

SEQ ID NO: 2944 - RNA, 103 nt, synthetic construct; identical to SEQ ID NO: 1797
  source 1..103: mol_type = other RNA
  modified_base 1: mod_base = OTHER; note = 2'-O-Methyl-cytidine phosphorothioate
  modified_base 2: mod_base = OTHER; note = 2'-O-Methyl-adenosine phosphorothioate
  modified_base 3: mod_base = OTHER; note = 2'-O-Methyl-guanosine phosphorothioate
  modified_base 21: mod_base = OTHER; note = 2'-O-Methyl-guanosine
  modified_base 28: mod_base = OTHER; note = 2'-O-Methyl-adenosine
  modified_base 29: mod_base = OTHER; note = 2'-O-Methyl-guanosine
  modified_base 30: mod_base = OTHER; note = 2'-O-Methyl-cytidine
  modified_base 31: mod_base = OTHER; note = 2'-O-Methyl-uridine
  modified_base 32: mod_base = OTHER; note = 2'-O-Methyl-adenosine
  modified_base 33: mod_base = OTHER; note = 2'-O-Methyl-guanosine
  modified_base 34: mod_base = OTHER; note = 2'-O-Methyl-adenosine
  modified_base 35: mod_base = OTHER; note = 2'-O-Methyl-adenosine
  modified_base 36: mod_base = OTHER; note = 2'-O-Methyl-adenosine
  modified_base 37: mod_base = OTHER; note = 2'-O-Methyl-uridine
  modified_base 38: mod_base = OTHER; note = 2'-O-Methyl-adenosine
  modified_base 39: mod_base = OTHER; note = 2'-O-Methyl-guanosine
  modified_base 40: mod_base = OTHER; note = 2'-O-Methyl-cytidine
  modified_base 41: mod_base = OTHER; note = 2'-O-Methyl-adenosine
  modified_base 42: mod_base = OTHER; note = 2'-O-Methyl-adenosine
  modified_base 46: mod_base = OTHER; note = 2'-O-Methyl-adenosine
  modified_base 48: mod_base = OTHER; note = 2'-O-Methyl-adenosine
  modified_base 50: mod_base = OTHER; note = 2'-O-Methyl-uridine
  modified_base 52: mod_base = OTHER; note = 2'-O-Methyl-adenosine
  modified_base 53: mod_base = OTHER; note = 2'-O-Methyl-guanosine
  modified_base 54: mod_base = OTHER; note = 2'-O-Methyl-guanosine
  modified_base 57: mod_base = OTHER; note = 2'-O-Methyl-adenosine
  modified_base 61: mod_base = OTHER; note = 2'-O-Methyl-cytidine
  modified_base 66: mod_base = OTHER; note = 2'-O-Methyl-uridine
  modified_base 67: mod_base = OTHER; note = 2'-O-Methyl-cytidine
  modified_base 70: mod_base = OTHER; note = 2'-O-Methyl-cytidine
  modified_base 71: mod_base = OTHER; note = 2'-O-Methyl-uridine
  modified_base 72: mod_base = OTHER; note = 2'-O-Methyl-uridine
  modified_base 73: mod_base = OTHER; note = 2'-O-Methyl-guanosine
  modified_base 74: mod_base = OTHER; note = 2'-O-Methyl-adenosine
  modified_base 75: mod_base = OTHER; note = 2'-O-Methyl-adenosine
  modified_base 76: mod_base = OTHER; note = 2'-O-Methyl-adenosine
  modified_base 77: mod_base = OTHER; note = 2'-O-Methyl-adenosine
  modified_base 78: mod_base = OTHER; note = 2'-O-Methyl-adenosine
  modified_base 79: mod_base = OTHER; note = 2'-O-Methyl-guanosine
  modified_base 80: mod_base = OTHER; note = 2'-O-Methyl-uridine
  modified_base 82: mod_base = OTHER; note = 2'-O-Methyl-guanosine
  modified_base 83: mod_base = OTHER; note = 2'-O-Methyl-cytidine
  modified_base 84: mod_base = OTHER; note = 2'-O-Methyl-adenosine
  modified_base 85: mod_base = OTHER; note = 2'-O-Methyl-cytidine
  modified_base 86: mod_base = OTHER; note = 2'-O-Methyl-cytidine
  modified_base 87: mod_base = OTHER; note = 2'-O-Methyl-guanosine
  modified_base 89: mod_base = OTHER; note = 2'-O-Methyl-guanosine
  modified_base 91: mod_base = OTHER; note = 2'-O-Methyl-cytidine
  modified_base 92: mod_base = OTHER; note = 2'-O-Methyl-guanosine
  modified_base 93: mod_base = OTHER; note = 2'-O-Methyl-guanosine
  modified_base 94: mod_base = OTHER; note = 2'-O-Methyl-uridine
  modified_base 95: mod_base = OTHER; note = 2'-O-Methyl-guanosine
  modified_base 96: mod_base = OTHER; note = 2'-O-Methyl-cytidine
  modified_base 97: mod_base = OTHER; note = 2'-O-Methyl-uridine
  modified_base 98: mod_base = OTHER; note = 2'-O-Methyl-uridine phosphorothioate
  modified_base 99: mod_base = OTHER; note = 2'-O-Methyl-uridine phosphorothioate
  modified_base 100: mod_base = OTHER; note = 2'-O-Methyl-uridine
  misc_difference 101: note = a, c, g, inosine, u, deoxyadenosine, deoxyguanosine, deoxycytidine, deoxyinosine, thymine, ribonebularine, 2'-O-methylnebularine, or 2'-deoxynebularine
  misc_difference 102: note = a, c, g, inosine, u, deoxyadenosine, deoxyguanosine, deoxycytidine, deoxyinosine, thymine, ribonebularine, 2'-O-methylnebularine, or 2'-deoxynebularine
  misc_difference 103: note = a, c, g, inosine, u, deoxyadenosine, deoxyguanosine, deoxycytidine, deoxyinosine, thymine, ribonebularine, 2'-O-methylnebularine, or 2'-deoxynebularine

SEQ ID NO: 2945 - RNA, 103 nt, synthetic construct; identical to SEQ ID NO: 1797
  source 1..103: mol_type = other RNA
  modified_base 1: mod_base = OTHER; note = 2'-O-Methyl-cytidine phosphorothioate
  modified_base 2: mod_base = OTHER; note = 2'-O-Methyl-adenosine phosphorothioate
  modified_base 3: mod_base = OTHER; note = 2'-O-Methyl-guanosine phosphorothioate
  modified_base 21: mod_base = OTHER; note = 2'-O-Methyl-guanosine
  modified_base 28: mod_base = OTHER; note = 2'-O-Methyl-adenosine
  modified_base 29: mod_base = OTHER; note = 2'-O-Methyl-guanosine
  modified_base 30: mod_base = OTHER; note = 2'-O-Methyl-cytidine
  modified_base 31: mod_base = OTHER; note = 2'-O-Methyl-uridine
  modified_base 32: mod_base = OTHER; note = 2'-O-Methyl-adenosine
  modified_base 34: mod_base = OTHER; note = 2'-O-Methyl-adenosine
  modified_base 35: mod_base = OTHER; note = 2'-O-Methyl-adenosine
  modified_base 36: mod_base = OTHER; note = 2'-O-Methyl-adenosine
  modified_base 37: mod_base = OTHER; note = 2'-O-Methyl-uridine
  modified_base 38: mod_base = OTHER; note = 2'-O-Methyl-adenosine
  modified_base 39: mod_base = OTHER; note = 2'-O-Methyl-guanosine
  modified_base 40: mod_base = OTHER; note = 2'-O-Methyl-cytidine
  modified_base 41: mod_base = OTHER; note = 2'-O-Methyl-adenosine
  modified_base 42: mod_base = OTHER; note = 2'-O-Methyl-adenosine
  modified_base 46: mod_base = OTHER; note = 2'-O-Methyl-adenosine
  modified_base 48: mod_base = OTHER; note = 2'-O-Methyl-adenosine
  modified_base 50: mod_base = OTHER; note = 2'-O-Methyl-uridine
  modified_base 52: mod_base = OTHER; note = 2'-O-Methyl-adenosine
  modified_base 53: mod_base = OTHER; note = 2'-O-Methyl-guanosine
  modified_base 54: mod_base = OTHER; note = 2'-O-Methyl-guanosine
  modified_base 57: mod_base = OTHER; note = 2'-O-Methyl-adenosine
  modified_base 61: mod_base = OTHER; note = 2'-O-Methyl-cytidine
  modified_base 66: mod_base = OTHER; note = 2'-O-Methyl-uridine
  modified_base 67: mod_base = OTHER; note = 2'-O-Methyl-cytidine
  modified_base 70: mod_base = OTHER; note = 2'-O-Methyl-cytidine
  modified_base 71: mod_base = OTHER; note = 2'-O-Methyl-uridine
  modified_base 72: mod_base = OTHER; note = 2'-O-Methyl-uridine
  modified_base 73: mod_base = OTHER; note = 2'-O-Methyl-guanosine
  modified_base 74: mod_base = OTHER; note = 2'-O-Methyl-adenosine
  modified_base 75: mod_base = OTHER; note = 2'-O-Methyl-adenosine
  modified_base 76: mod_base = OTHER; note = 2'-O-Methyl-adenosine
  modified_base 77: mod_base = OTHER; note = 2'-O-Methyl-adenosine
  modified_base 78: mod_base = OTHER; note = 2'-O-Methyl-adenosine
  modified_base 79: mod_base = OTHER; note = 2'-O-Methyl-guanosine
  modified_base 80: mod_base = OTHER; note = 2'-O-Methyl-uridine
  modified_base 82: mod_base = OTHER; note = 2'-O-Methyl-guanosine
  modified_base 83: mod_base = OTHER; note = 2'-O-Methyl-cytidine
  modified_base 84: mod_base = OTHER; note = 2'-O-Methyl-adenosine
  modified_base 85: mod_base = OTHER; note = 2'-O-Methyl-cytidine
  modified_base 86: mod_base = OTHER; note = 2'-O-Methyl-cytidine
  modified_base 87: mod_base = OTHER; note = 2'-O-Methyl-guanosine
  modified_base 89: mod_base = OTHER; note = 2'-O-Methyl-guanosine
  modified_base 92: mod_base = OTHER; note = 2'-O-Methyl-guanosine
  modified_base 93: mod_base = OTHER; note = 2'-O-Methyl-guanosine
  modified_base 94: mod_base = OTHER; note = 2'-O-Methyl-uridine
  modified_base 95: mod_base = OTHER; note = 2'-O-Methyl-guanosine
  modified_base 96: mod_base = OTHER; note = 2'-O-Methyl-cytidine
  modified_base 97: mod_base = OTHER; note = 2'-O-Methyl-uridine
  modified_base 98: mod_base = OTHER; note = 2'-O-Methyl-uridine phosphorothioate
  modified_base 99: mod_base = OTHER; note = 2'-O-Methyl-uridine phosphorothioate
  modified_base 100: mod_base = OTHER; note = 2'-O-Methyl-uridine
  misc_difference 101: note = a, c, g, inosine, u, deoxyadenosine, deoxyguanosine, deoxycytidine, deoxyinosine, thymine, ribonebularine, 2'-O-methylnebularine, or 2'-deoxynebularine
  misc_difference 102: note = a, c, g, inosine, u, deoxyadenosine, deoxyguanosine, deoxycytidine, deoxyinosine, thymine, ribonebularine, 2'-O-methylnebularine, or 2'-deoxynebularine
  misc_difference 103: note = a, c, g, inosine, u, deoxyadenosine, deoxyguanosine, deoxycytidine, deoxyinosine, thymine, ribonebularine, 2'-O-methylnebularine, or 2'-deoxynebularine

SEQ ID NO: 2946 - RNA, 103 nt, synthetic construct; identical to SEQ ID NO: 1797
  source 1..103: mol_type = other RNA
  modified_base 1: mod_base = OTHER; note = 2'-O-Methyl-cytidine phosphorothioate
  modified_base 2: mod_base = OTHER; note = 2'-O-Methyl-adenosine phosphorothioate
  modified_base 3: mod_base = OTHER; note = 2'-O-Methyl-guanosine phosphorothioate
  modified_base 21: mod_base = OTHER; note = 2'-O-Methyl-guanosine
  modified_base 28: mod_base = OTHER; note = 2'-O-Methyl-adenosine
  modified_base 29: mod_base = OTHER; note = 2'-O-Methyl-guanosine
  modified_base 30: mod_base = OTHER; note = 2'-O-Methyl-cytidine
  modified_base 31: mod_base = OTHER; note = 2'-O-Methyl-uridine
  modified_base 32: mod_base = OTHER; note = 2'-O-Methyl-adenosine
  modified_base 34: mod_base = OTHER; note = 2'-O-Methyl-adenosine
  modified_base 35: mod_base = OTHER; note = 2'-O-Methyl-adenosine
  modified_base 36: mod_base = OTHER; note = 2'-O-Methyl-adenosine
  modified_base 37: mod_base = OTHER; note = 2'-O-Methyl-uridine
  modified_base 38: mod_base = OTHER; note = 2'-O-Methyl-adenosine
  modified_base 39: mod_base = OTHER; note = 2'-O-Methyl-guanosine
  modified_base 40: mod_base = OTHER; note = 2'-O-Methyl-cytidine
  modified_base 41: mod_base = OTHER; note = 2'-O-Methyl-adenosine
  modified_base 42: mod_base = OTHER; note = 2'-O-Methyl-adenosine
  modified_base 46: mod_base = OTHER; note = 2'-O-Methyl-adenosine
  modified_base 48: mod_base = OTHER; note = 2'-O-Methyl-adenosine
  modified_base 50: mod_base = OTHER; note = 2'-O-Methyl-uridine
  modified_base 52: mod_base = OTHER; note = 2'-O-Methyl-adenosine
  modified_base 53: mod_base = OTHER; note = 2'-O-Methyl-guanosine
  modified_base 54: mod_base = OTHER; note = 2'-O-Methyl-guanosine
  modified_base 57: mod_base = OTHER; note = 2'-O-Methyl-adenosine
  modified_base 61: mod_base = OTHER; note = 2'-O-Methyl-cytidine
  modified_base 66: mod_base = OTHER; note = 2'-O-Methyl-uridine
  modified_base 67: mod_base = OTHER; note = 2'-O-Methyl-cytidine
  modified_base 70: mod_base = OTHER; note = 2'-O-Methyl-cytidine
  modified_base 71: mod_base = OTHER; note = 2'-O-Methyl-uridine
  modified_base 72: mod_base = OTHER; note = 2'-O-Methyl-uridine
  modified_base 73: mod_base = OTHER; note = 2'-O-Methyl-guanosine
  modified_base 74: mod_base = OTHER; note = 2'-O-Methyl-adenosine
  modified_base 75: mod_base = OTHER; note = 2'-O-Methyl-adenosine
  modified_base 76: mod_base = OTHER; note = 2'-O-Methyl-adenosine
  modified_base 77: mod_base = OTHER; note = 2'-O-Methyl-adenosine
  modified_base 78: mod_base = OTHER; note = 2'-O-Methyl-adenosine
  modified_base 79: mod_base = OTHER; note = 2'-O-Methyl-guanosine
  modified_base 80: mod_base = OTHER; note = 2'-O-Methyl-uridine
  modified_base 82: mod_base = OTHER; note = 2'-O-Methyl-guanosine
  modified_base 83: mod_base = OTHER; note = 2'-O-Methyl-cytidine
  modified_base 84: mod_base = OTHER; note = 2'-O-Methyl-adenosine
  modified_base 85: mod_base = OTHER; note = 2'-O-Methyl-cytidine
  modified_base 86: mod_base = OTHER; note = 2'-O-Methyl-cytidine
  modified_base 87: mod_base = OTHER; note = 2'-O-Methyl-guanosine
  modified_base 89: mod_base = OTHER; note = 2'-O-Methyl-guanosine
  modified_base 91: mod_base = OTHER; note = 2'-O-Methyl-cytidine
  modified_base 92: mod_base = OTHER; note = 2'-O-Methyl-guanosine
  modified_base 93: mod_base = OTHER; note = 2'-O-Methyl-guanosine
  modified_base 94: mod_base = OTHER; note = 2'-O-Methyl-uridine
  modified_base 95: mod_base = OTHER; note = 2'-O-Methyl-guanosine
  modified_base 96: mod_base = OTHER; note = 2'-O-Methyl-cytidine
  modified_base 97: mod_base = OTHER; note = 2'-O-Methyl-uridine
  modified_base 98: mod_base = OTHER; note = 2'-O-Methyl-uridine phosphorothioate
  modified_base 99: mod_base = OTHER; note = 2'-O-Methyl-uridine phosphorothioate
  modified_base 100: mod_base = OTHER; note = 2'-O-Methyl-uridine
  misc_difference 101: note = a, c, g, inosine, u, deoxyadenosine, deoxyguanosine, deoxycytidine, deoxyinosine, thymine, ribonebularine, 2'-O-methylnebularine, or 2'-deoxynebularine
  misc_difference 102: note = a, c, g, inosine, u, deoxyadenosine, deoxyguanosine, deoxycytidine, deoxyinosine, thymine, ribonebularine, 2'-O-methylnebularine, or 2'-deoxynebularine
  misc_difference 103: note = a, c, g, inosine, u, deoxyadenosine, deoxyguanosine, deoxycytidine, deoxyinosine, thymine, ribonebularine, 2'-O-methylnebularine, or 2'-deoxynebularine

SEQ ID NO: 2947 - RNA, 103 nt, synthetic construct; identical to SEQ ID NO: 1797
  source 1..103: mol_type = other RNA
  modified_base 1: mod_base = OTHER; note = 2'-O-Methyl-cytidine phosphorothioate
  modified_base 2: mod_base = OTHER; note = 2'-O-Methyl-adenosine phosphorothioate
  modified_base 3: mod_base = OTHER; note = 2'-O-Methyl-guanosine phosphorothioate
  modified_base 21: mod_base = OTHER; note = 2'-O-Methyl-guanosine
  modified_base 28: mod_base = OTHER; note = 2'-O-Methyl-adenosine
  modified_base 29: mod_base = OTHER; note = 2'-O-Methyl-guanosine
  modified_base 30: mod_base = OTHER; note = 2'-O-Methyl-cytidine
  modified_base 31: mod_base = OTHER; note = 2'-O-Methyl-uridine
  modified_base 32: mod_base = OTHER; note = 2'-O-Methyl-adenosine
  modified_base 34: mod_base = OTHER; note = 2'-O-Methyl-adenosine
  modified_base 35: mod_base = OTHER; note = 2'-O-Methyl-adenosine
  modified_base 36: mod_base = OTHER; note = 2'-O-Methyl-adenosine
  modified_base 37: mod_base = OTHER; note = 2'-O-Methyl-uridine
  modified_base 38: mod_base = OTHER; note = 2'-O-Methyl-adenosine
  modified_base 39: mod_base = OTHER; note = 2'-O-Methyl-guanosine
  modified_base 40: mod_base = OTHER; note = 2'-O-Methyl-cytidine
  modified_base 41: mod_base = OTHER; note = 2'-O-Methyl-adenosine
  modified_base 42: mod_base = OTHER; note = 2'-O-Methyl-adenosine
  modified_base 46: mod_base = OTHER; note = 2'-O-Methyl-adenosine
  modified_base 48: mod_base = OTHER; note = 2'-O-Methyl-adenosine
  modified_base 50: mod_base = OTHER; note = 2'-O-Methyl-uridine
  modified_base 52: mod_base = OTHER; note = 2'-O-Methyl-adenosine
  modified_base 53: mod_base = OTHER; note = 2'-O-Methyl-guanosine
  modified_base 54: mod_base = OTHER; note = 2'-O-Methyl-guanosine
  modified_base 55: mod_base = OTHER; note = 2'-O-Methyl-cytidine
  modified_base 56: mod_base = OTHER; note = 2'-O-Methyl-uridine
  modified_base 57: mod_base = OTHER; note = 2'-O-Methyl-adenosine
  modified_base 60: mod_base = OTHER; note = 2'-O-Methyl-cytidine
  modified_base 61: mod_base = OTHER; note = 2'-O-Methyl-cytidine
  modified_base 66: mod_base = OTHER; note = 2'-O-Methyl-uridine
  modified_base 67: mod_base = OTHER; note = 2'-O-Methyl-cytidine
  modified_base 70: mod_base = OTHER; note = 2'-O-Methyl-cytidine
  modified_base 71: mod_base = OTHER; note = 2'-O-Methyl-uridine
  modified_base 72: mod_base = OTHER; note = 2'-O-Methyl-uridine
  modified_base 74: mod_base = OTHER; note = 2'-O-Methyl-adenosine
  modified_base 75: mod_base = OTHER; note = 2'-O-Methyl-adenosine
  modified_base 76: mod_base = OTHER; note = 2'-O-Methyl-adenosine
  modified_base 77: mod_base = OTHER; note = 2'-O-Methyl-adenosine
  modified_base 78: mod_base = OTHER; note = 2'-O-Methyl-adenosine
  modified_base 79: mod_base = OTHER; note = 2'-O-Methyl-guanosine
  modified_base 80: mod_base = OTHER; note = 2'-O-Methyl-uridine
  modified_base 82: mod_base = OTHER; note = 2'-O-Methyl-guanosine
  modified_base 83: mod_base = OTHER; note = 2'-O-Methyl-cytidine
  modified_base 84: mod_base = OTHER; note = 2'-O-Methyl-adenosine
  modified_base 85: mod_base = OTHER; note = 2'-O-Methyl-cytidine
  modified_base 86: mod_base = OTHER; note = 2'-O-Methyl-cytidine
  modified_base 87: mod_base = OTHER; note = 2'-O-Methyl-guanosine
  modified_base 89: mod_base = OTHER; note = 2'-O-Methyl-guanosine
  modified_base 92: mod_base = OTHER; note = 2'-O-Methyl-guanosine
  modified_base 93: mod_base = OTHER; note = 2'-O-Methyl-guanosine
  modified_base 94: mod_base = OTHER; note = 2'-O-Methyl-uridine
  modified_base 95: mod_base = OTHER; note = 2'-O-Methyl-guanosine
  modified_base 96: mod_base = OTHER; note = 2'-O-Methyl-cytidine
  modified_base 97: mod_base = OTHER; note = 2'-O-Methyl-uridine
  modified_base 98: mod_base = OTHER; note = 2'-O-Methyl-uridine phosphorothioate
  modified_base 99: mod_base = OTHER; note = 2'-O-Methyl-uridine phosphorothioate
  modified_base 100: mod_base = OTHER; note = 2'-O-Methyl-uridine
  misc_difference 101: note = a, c, g, inosine, u, deoxyadenosine, deoxyguanosine, deoxycytidine, deoxyinosine, thymine, ribonebularine, 2'-O-methylnebularine, or 2'-deoxynebularine
  misc_difference 102: note = a, c, g, inosine, u, deoxyadenosine, deoxyguanosine, deoxycytidine, deoxyinosine, thymine, ribonebularine, 2'-O-methylnebularine, or 2'-deoxynebularine
  misc_difference 103: note = a, c, g, inosine, u, deoxyadenosine, deoxyguanosine, deoxycytidine, deoxyinosine, thymine, ribonebularine, 2'-O-methylnebularine, or 2'-deoxynebularine

SEQ ID NO: 2948 - RNA, 103 nt, synthetic construct; identical to SEQ ID NO: 1795
  source 1..103: mol_type = other RNA
  modified_base 1: mod_base = OTHER; note = 2'-O-Methyl-cytidine phosphorothioate
  modified_base 2: mod_base = OTHER; note = 2'-O-Methyl-cytidine phosphorothioate
  modified_base 3: mod_base = OTHER; note = 2'-O-Methyl-cytidine phosphorothioate
  modified_base 21: mod_base = OTHER; note = 2'-O-Methyl-guanosine
  modified_base 28: mod_base = OTHER; note = 2'-O-Methyl-adenosine
  modified_base 29: mod_base = OTHER; note = 2'-O-Methyl-guanosine
  modified_base 30: mod_base = OTHER; note = 2'-O-Methyl-cytidine
  modified_base 31: mod_base = OTHER; note = 2'-O-Methyl-uridine
  modified_base 32: mod_base = OTHER; note = 2'-O-Methyl-adenosine
  modified_base 33: mod_base = OTHER; note = 2'-O-Methyl-guanosine
  modified_base 34: mod_base = OTHER; note = 2'-O-Methyl-adenosine
  modified_base 35: mod_base = OTHER; note = 2'-O-Methyl-adenosine
  modified_base 36: mod_base = OTHER; note = 2'-O-Methyl-adenosine
  modified_base 37: mod_base = OTHER; note = 2'-O-Methyl-uridine
  modified_base 38: mod_base = OTHER; note = 2'-O-Methyl-adenosine
  modified_base 39: mod_base = OTHER; note = 2'-O-Methyl-guanosine
  modified_base 40: mod_base = OTHER; note = 2'-O-Methyl-cytidine
  modified_base 41: mod_base = OTHER; note = 2'-O-Methyl-adenosine
  modified_base 42: mod_base = OTHER; note = 2'-O-Methyl-adenosine
  modified_base 46: mod_base = OTHER; note = 2'-O-Methyl-adenosine
  modified_base 48: mod_base = OTHER; note = 2'-O-Methyl-adenosine
  modified_base 50: mod_base = OTHER; note = 2'-O-Methyl-uridine
  modified_base 52: mod_base = OTHER; note = 2'-O-Methyl-adenosine
  modified_base 53: mod_base = OTHER; note = 2'-O-Methyl-guanosine
  modified_base 54: mod_base = OTHER; note = 2'-O-Methyl-guanosine
  modified_base 55: mod_base = OTHER; note = 2'-O-Methyl-cytidine
  modified_base 56: mod_base = OTHER; note = 2'-O-Methyl-uridine
  modified_base 57: mod_base = OTHER; note = 2'-O-Methyl-adenosine
  modified_base 60: mod_base = OTHER; note = 2'-O-Methyl-cytidine
  modified_base 61: mod_base = OTHER; note = 2'-O-Methyl-cytidine
  modified_base 64: mod_base = OTHER; note = uridine phosphorothioate
  modified_base 66: mod_base = OTHER; note = 2'-O-Methyl-uridine
  modified_base 67: mod_base = OTHER; note = 2'-O-Methyl-cytidine
  modified_base 70: mod_base = OTHER; note = 2'-O-Methyl-cytidine
  modified_base 71: mod_base = OTHER; note = 2'-O-Methyl-uridine
  modified_base 72: mod_base = OTHER; note = 2'-O-Methyl-uridine
  modified_base 73: mod_base = OTHER; note = 2'-O-Methyl-guanosine
  modified_base 74: mod_base = OTHER; note = 2'-O-Methyl-adenosine
  modified_base 75: mod_base = OTHER; note = 2'-O-Methyl-adenosine
  modified_base 76: mod_base = OTHER; note = 2'-O-Methyl-adenosine
  modified_base 77: mod_base = OTHER; note = 2'-O-Methyl-adenosine
  modified_base 78: mod_base = OTHER; note = 2'-O-Methyl-adenosine
  modified_base 79: mod_base = OTHER; note = 2'-O-Methyl-guanosine
  modified_base 80: mod_base = OTHER; note = 2'-O-Methyl-uridine
  modified_base 81: mod_base = OTHER; note = 2'-O-Methyl-guanosine
  modified_base 83: mod_base = OTHER; note = 2'-O-Methyl-cytidine
  modified_base 84: mod_base = OTHER; note = 2'-O-Methyl-adenosine
  modified_base 85: mod_base = OTHER; note = 2'-O-Methyl-cytidine
  modified_base 86: mod_base = OTHER; note = 2'-O-Methyl-cytidine
  modified_base 87: mod_base = OTHER; note = 2'-O-Methyl-guanosine
  modified_base 88: mod_base = OTHER; note = 2'-O-Methyl-adenosine
  modified_base 89: mod_base = OTHER; note = 2'-O-Methyl-guanosine
  modified_base 90: mod_base = OTHER; note = 2'-O-Methyl-uridine
  modified_base 91: mod_base = OTHER; note = 2'-O-Methyl-cytidine
  modified_base 92: mod_base = OTHER; note = 2'-O-Methyl-guanosine
  modified_base 93: mod_base = OTHER; note = 2'-O-Methyl-guanosine
  modified_base 94: mod_base = OTHER; note = 2'-O-Methyl-uridine
  modified_base 95: mod_base = OTHER; note = 2'-O-Methyl-guanosine
  modified_base 96: mod_base = OTHER; note = 2'-O-Methyl-cytidine
  modified_base 97: mod_base = OTHER; note = 2'-O-Methyl-uridine
  modified_base 98: mod_base = OTHER; note = 2'-O-Methyl-uridine phosphorothioate
  modified_base 99: mod_base = OTHER; note = 2'-O-Methyl-uridine phosphorothioate
  modified_base 100: mod_base = OTHER; note = 2'-O-Methyl-uridine
  misc_difference 101: note = a, c, g, inosine, u, deoxyadenosine, deoxyguanosine, deoxycytidine, deoxyinosine, thymine, ribonebularine, 2'-O-methylnebularine, or 2'-deoxynebularine
  misc_difference 102: note = a, c, g, inosine, u, deoxyadenosine, deoxyguanosine, deoxycytidine, deoxyinosine, thymine, ribonebularine, 2'-O-methylnebularine, or 2'-deoxynebularine
  misc_difference 103: note = a, c, g, inosine, u, deoxyadenosine, deoxyguanosine, deoxycytidine, deoxyinosine, thymine, ribonebularine, 2'-O-methylnebularine, or 2'-deoxynebularine

SEQ ID NO: 2949 - RNA, 103 nt, synthetic construct; identical to SEQ ID NO: 1795
  source 1..103: mol_type = other RNA
  modified_base 1: mod_base = OTHER; note = 2'-O-Methyl-cytidine phosphorothioate
  modified_base 2: mod_base = OTHER; note = 2'-O-Methyl-cytidine phosphorothioate
  modified_base 3: mod_base = OTHER; note = 2'-O-Methyl-cytidine phosphorothioate
  modified_base 21: mod_base = OTHER; note = 2'-O-Methyl-guanosine
  modified_base 28: mod_base = OTHER; note = 2'-O-Methyl-adenosine
  modified_base 29: mod_base = OTHER; note = 2'-O-Methyl-guanosine
  modified_base 30: mod_base = OTHER; note = 2'-O-Methyl-cytidine
  modified_base 31: mod_base = OTHER; note = 2'-O-Methyl-uridine
  modified_base 32: mod_base = OTHER; note = 2'-O-Methyl-adenosine
  modified_base 34: mod_base = OTHER; note = 2'-O-Methyl-adenosine
  modified_base 35: mod_base = OTHER; note = 2'-O-Methyl-adenosine
  modified_base 36: mod_base = OTHER; note = 2'-O-Methyl-adenosine
  modified_base 37: mod_base = OTHER; note = 2'-O-Methyl-uridine
  modified_base 38: mod_base = OTHER; note = 2'-O-Methyl-adenosine
  modified_base 39: mod_base = OTHER; note = 2'-O-Methyl-guanosine
  modified_base 40: mod_base = OTHER; note = 2'-O-Methyl-cytidine
  modified_base 41: mod_base = OTHER; note = 2'-O-Methyl-adenosine
  modified_base 42: mod_base = OTHER; note = 2'-O-Methyl-adenosine
  modified_base 46: mod_base = OTHER; note = 2'-O-Methyl-adenosine
  modified_base 48: mod_base = OTHER; note = 2'-O-Methyl-adenosine
  modified_base 50: mod_base = OTHER; note = 2'-O-Methyl-uridine
  modified_base 52: mod_base = OTHER; note = 2'-O-Methyl-adenosine
  modified_base 53: mod_base = OTHER; note = 2'-O-Methyl-guanosine
  modified_base 54: mod_base = OTHER; note = 2'-O-Methyl-guanosine
  modified_base 55: mod_base = OTHER; note = 2'-O-Methyl-cytidine
  modified_base 56: mod_base = OTHER; note = 2'-O-Methyl-uridine
  modified_base 57: mod_base = OTHER; note = 2'-O-Methyl-adenosine
  modified_base 60: mod_base = OTHER; note = 2'-O-Methyl-cytidine
  modified_base 61: mod_base = OTHER; note = 2'-O-Methyl-cytidine
  modified_base 64: mod_base = OTHER; note = uridine phosphorothioate
  modified_base 66: mod_base = OTHER; note = 2'-O-Methyl-uridine
  modified_base 67: mod_base = OTHER; note = 2'-O-Methyl-cytidine
  modified_base 70: mod_base = OTHER; note = 2'-O-Methyl-cytidine
  modified_base 71: mod_base = OTHER; note = 2'-O-Methyl-uridine
  modified_base 72: mod_base = OTHER; note = 2'-O-Methyl-uridine
  modified_base 74: mod_base = OTHER; note = 2'-O-Methyl-adenosine
  modified_base 75: mod_base = OTHER; note = 2'-O-Methyl-adenosine
  modified_base 76: mod_base = OTHER; note = 2'-O-Methyl-adenosine
  modified_base 77: mod_base = OTHER; note = 2'-O-Methyl-adenosine
  modified_base 78: mod_base = OTHER; note = 2'-O-Methyl-adenosine
  modified_base 79: mod_base = OTHER; note = 2'-O-Methyl-guanosine
  modified_base 80: mod_base = OTHER; note = 2'-O-Methyl-uridine
  modified_base 81: mod_base = OTHER; note = 2'-O-Methyl-guanosine
  modified_base 83: mod_base = OTHER; note = 2'-O-Methyl-cytidine
  modified_base 84: mod_base = OTHER; note = 2'-O-Methyl-adenosine
  modified_base 85: mod_base = OTHER; note = 2'-O-Methyl-cytidine
  modified_base 86: mod_base = OTHER; note = 2'-O-Methyl-cytidine
  modified_base 87: mod_base = OTHER; note = 2'-O-Methyl-guanosine
  modified_base 88: mod_base = OTHER; note = 2'-O-Methyl-adenosine
  modified_base 89: mod_base = OTHER; note = 2'-O-Methyl-guanosine
  modified_base 90: mod_base = OTHER; note = 2'-O-Methyl-uridine
  modified_base 91: mod_base = OTHER; note = 2'-O-Methyl-cytidine
  modified_base 92: mod_base = OTHER; note = 2'-O-Methyl-guanosine
  modified_base 93: mod_base = OTHER; note = 2'-O-Methyl-guanosine
  modified_base 94: mod_base = OTHER; note = 2'-O-Methyl-uridine
  modified_base 95: mod_base = OTHER; note = 2'-O-Methyl-guanosine
  modified_base 96: mod_base = OTHER; note = 2'-O-Methyl-cytidine
  modified_base 97: mod_base = OTHER; note = 2'-O-Methyl-uridine
  modified_base 98: mod_base = OTHER; note = 2'-O-Methyl-uridine phosphorothioate
  modified_base 99: mod_base = OTHER; note = 2'-O-Methyl-uridine phosphorothioate
  modified_base 100: mod_base = OTHER; note = 2'-O-Methyl-uridine
  misc_difference 101: note = a, c, g, inosine, u, deoxyadenosine, deoxyguanosine, deoxycytidine, deoxyinosine, thymine, ribonebularine, 2'-O-methylnebularine, or 2'-deoxynebularine
  misc_difference 102: note = a, c, g, inosine, u, deoxyadenosine, deoxyguanosine, deoxycytidine, deoxyinosine, thymine, ribonebularine, 2'-O-methylnebularine, or 2'-deoxynebularine
  misc_difference 103: note = a, c, g, inosine, u, deoxyadenosine, deoxyguanosine, deoxycytidine, deoxyinosine, thymine, ribonebularine, 2'-O-methylnebularine, or 2'-deoxynebularine

SEQ ID NO: 2950 - RNA, 103 nt, synthetic construct; identical to SEQ ID NO: 1796
  source 1..103: mol_type = other RNA
  modified_base 1: mod_base = OTHER; note = 2'-O-Methyl-guanosine phosphorothioate
  modified_base 2: mod_base = OTHER; note = 2'-O-Methyl-adenosine phosphorothioate
  modified_base 3: mod_base = OTHER; note = 2'-O-Methyl-guanosine phosphorothioate
  modified_base 21: mod_base = OTHER; note = 2'-O-Methyl-guanosine
  modified_base 28: mod_base = OTHER; note = 2'-O-Methyl-adenosine
  modified_base 29: mod_base = OTHER; note = 2'-O-Methyl-guanosine
  modified_base 30: mod_base = OTHER; note = 2'-O-Methyl-cytidine
  modified_base 31: mod_base = OTHER; note = 2'-O-Methyl-uridine
  modified_base 32: mod_base = OTHER; note = 2'-O-Methyl-adenosine
  modified_base 33: mod_base = OTHER; note = 2'-O-Methyl-guanosine
  modified_base 34: mod_base = OTHER; note = 2'-O-Methyl-adenosine
  modified_base 35: mod_base = OTHER; note = 2'-O-Methyl-adenosine
  modified_base 36: mod_base = OTHER; note = 2'-O-Methyl-adenosine
  modified_base 37: mod_base = OTHER; note = 2'-O-Methyl-uridine
  modified_base 38: mod_base = OTHER; note = 2'-O-Methyl-adenosine
  modified_base 39: mod_base = OTHER; note = 2'-O-Methyl-guanosine
  modified_base 40: mod_base = OTHER; note = 2'-O-Methyl-cytidine
  modified_base 41: mod_base = OTHER; note = 2'-O-Methyl-adenosine
  modified_base 42: mod_base = OTHER; note = 2'-O-Methyl-adenosine
  modified_base 46: mod_base = OTHER; note = 2'-O-Methyl-adenosine
  modified_base 48: mod_base = OTHER; note = 2'-O-Methyl-adenosine
  modified_base 50: mod_base = OTHER; note = 2'-O-Methyl-uridine
  modified_base 52: mod_base = OTHER; note = 2'-O-Methyl-adenosine
  modified_base 53: mod_base = OTHER; note = 2'-O-Methyl-guanosine
  modified_base 54: mod_base = OTHER; note = 2'-O-Methyl-guanosine
  modified_base 55: mod_base = OTHER; note = 2'-O-Methyl-cytidine
  modified_base 56: mod_base = OTHER; note = 2'-O-Methyl-uridine
  modified_base 57: mod_base = OTHER; note = 2'-O-Methyl-adenosine
  modified_base 60: mod_base = OTHER; note = 2'-O-Methyl-cytidine
  modified_base 61: mod_base = OTHER; note = 2'-O-Methyl-cytidine
  modified_base 64: mod_base = OTHER; note = uridine phosphorothioate
  modified_base 66: mod_base = OTHER; note = 2'-O-Methyl-uridine
  modified_base 67: mod_base = OTHER; note = 2'-O-Methyl-cytidine
  modified_base 70: mod_base = OTHER; note = 2'-O-Methyl-cytidine
  modified_base 71: mod_base = OTHER; note = 2'-O-Methyl-uridine
  modified_base 72: mod_base = OTHER; note = 2'-O-Methyl-uridine
  modified_base 73: mod_base = OTHER; note = 2'-O-Methyl-guanosine
  modified_base 74: mod_base = OTHER; note = 2'-O-Methyl-adenosine
  modified_base 75: mod_base = OTHER; note = 2'-O-Methyl-adenosine
  modified_base 76: mod_base = OTHER; note = 2'-O-Methyl-adenosine
  modified_base 77: mod_base = OTHER; note = 2'-O-Methyl-adenosine
  modified_base 78: mod_base = OTHER; note = 2'-O-Methyl-adenosine
  modified_base 79: mod_base = OTHER; note = 2'-O-Methyl-guanosine
  modified_base 80: mod_base = OTHER; note = 2'-O-Methyl-uridine
  modified_base 81: mod_base = OTHER; note = 2'-O-Methyl-guanosine
  modified_base 83: mod_base = OTHER; note = 2'-O-Methyl-cytidine
  modified_base 84: mod_base = OTHER; note = 2'-O-Methyl-adenosine
  modified_base 85: mod_base = OTHER; note = 2'-O-Methyl-cytidine
  modified_base 86: mod_base = OTHER; note = 2'-O-Methyl-cytidine
  modified_base 87: mod_base = OTHER; note = 2'-O-Methyl-guanosine
  modified_base 88: mod_base = OTHER; note = 2'-O-Methyl-adenosine
  modified_base 89: mod_base = OTHER; note = 2'-O-Methyl-guanosine
  modified_base 90: mod_base = OTHER; note = 2'-O-Methyl-uridine
  modified_base 91: mod_base = OTHER; note = 2'-O-Methyl-cytidine
  modified_base 92: mod_base = OTHER; note = 2'-O-Methyl-guanosine
  modified_base 93: mod_base = OTHER; note = 2'-O-Methyl-guanosine
  modified_base 94: mod_base = OTHER; note = 2'-O-Methyl-uridine
  modified_base 95: mod_base = OTHER; note = 2'-O-Methyl-guanosine
  modified_base 96: mod_base = OTHER; note = 2'-O-Methyl-cytidine
  modified_base 97: mod_base = OTHER; note = 2'-O-Methyl-uridine
  modified_base 98: mod_base = OTHER; note = 2'-O-Methyl-uridine phosphorothioate
  modified_base 99: mod_base = OTHER; note = 2'-O-Methyl-uridine phosphorothioate
  modified_base 100: mod_base = OTHER; note = 2'-O-Methyl-uridine
  misc_difference 101: note = a, c, g, inosine, u, deoxyadenosine, deoxyguanosine, deoxycytidine, deoxyinosine, thymine, ribonebularine, 2'-O-methylnebularine, or 2'-deoxynebularine
  misc_difference 102: note = a, c, g, inosine, u, deoxyadenosine, deoxyguanosine, deoxycytidine, deoxyinosine, thymine, ribonebularine, 2'-O-methylnebularine, or 2'-deoxynebularine
  misc_difference 103: note = a, c, g, inosine, u, deoxyadenosine, deoxyguanosine, deoxycytidine, deoxyinosine, thymine, ribonebularine, 2'-O-methylnebularine, or 2'-deoxynebularine

SEQ ID NO: 2951 - RNA, 103 nt, synthetic construct; identical to SEQ ID NO: 1796
  source 1..103: mol_type = other RNA
  modified_base 1: mod_base = OTHER; note = 2'-O-Methyl-guanosine phosphorothioate
  modified_base 2: mod_base = OTHER; note = 2'-O-Methyl-adenosine phosphorothioate
  modified_base 3: mod_base = OTHER; note = 2'-O-Methyl-guanosine phosphorothioate
  modified_base 21: mod_base = OTHER; note = 2'-O-Methyl-guanosine
  modified_base 28: mod_base = OTHER; note = 2'-O-Methyl-adenosine
  modified_base 29: mod_base = OTHER; note = 2'-O-Methyl-guanosine
  modified_base 30: mod_base = OTHER; note = 2'-O-Methyl-cytidine
  modified_base 31: mod_base = OTHER; note = 2'-O-Methyl-uridine
  modified_base 32: mod_base = OTHER; note = 2'-O-Methyl-adenosine
  modified_base 34: mod_base = OTHER; note = 2'-O-Methyl-adenosine
  modified_base 35: mod_base = OTHER; note = 2'-O-Methyl-adenosine
  modified_base 36: mod_base = OTHER; note = 2'-O-Methyl-adenosine
  modified_base 37: mod_base = OTHER; note = 2'-O-Methyl-uridine
  modified_base 38: mod_base = OTHER; note = 2'-O-Methyl-adenosine
  modified_base 39: mod_base = OTHER; note = 2'-O-Methyl-guanosine
  modified_base 40: mod_base = OTHER; note = 2'-O-Methyl-cytidine
  modified_base 41: mod_base = OTHER; note = 2'-O-Methyl-adenosine
  modified_base 42: mod_base = OTHER; note = 2'-O-Methyl-adenosine
  modified_base 46: mod_base = OTHER; note = 2'-O-Methyl-adenosine
  modified_base 48: mod_base = OTHER; note = 2'-O-Methyl-adenosine
  modified_base 50: mod_base = OTHER; note = 2'-O-Methyl-uridine
  modified_base 52: mod_base = OTHER; note = 2'-O-Methyl-adenosine
  modified_base 53: mod_base = OTHER; note = 2'-O-Methyl-guanosine
  modified_base 54: mod_base = OTHER; note = 2'-O-Methyl-guanosine
  modified_base 55: mod_base = OTHER; note = 2'-O-Methyl-cytidine
  modified_base 56: mod_base = OTHER; note = 2'-O-Methyl-uridine
  modified_base 57: mod_base = OTHER; note = 2'-O-Methyl-adenosine
  modified_base 60: mod_base = OTHER; note = 2'-O-Methyl-cytidine
  modified_base 61: mod_base = OTHER; note = 2'-O-Methyl-cytidine
  modified_base 64: mod_base = OTHER; note = uridine phosphorothioate
  modified_base 66: mod_base = OTHER; note = 2'-O-Methyl-uridine
  modified_base 67: mod_base = OTHER; note = 2'-O-Methyl-cytidine
  modified_base 70: mod_base = OTHER; note = 2'-O-Methyl-cytidine
  modified_base 71: mod_base = OTHER; note = 2'-O-Methyl-uridine
  modified_base 72: mod_base = OTHER; note = 2'-O-Methyl-uridine
  modified_base 74: mod_base = OTHER; note = 2'-O-Methyl-adenosine
  modified_base 75: mod_base = OTHER; note = 2'-O-Methyl-adenosine
  modified_base 76: mod_base = OTHER; note = 2'-O-Methyl-adenosine
  modified_base 77: mod_base = OTHER; note = 2'-O-Methyl-adenosine
  modified_base 78: mod_base = OTHER; note = 2'-O-Methyl-adenosine
  modified_base 79: mod_base = OTHER; note = 2'-O-Methyl-guanosine
  modified_base 80: mod_base = OTHER; note = 2'-O-Methyl-uridine
  modified_base 81: mod_base = OTHER; note = 2'-O-Methyl-guanosine
  modified_base 83: mod_base = OTHER; note = 2'-O-Methyl-cytidine
  modified_base 84: mod_base = OTHER; note = 2'-O-Methyl-adenosine
  modified_base 85: mod_base = OTHER; note = 2'-O-Methyl-cytidine
  modified_base 86: mod_base = OTHER; note = 2'-O-Methyl-cytidine
  modified_base 87: mod_base = OTHER; note = 2'-O-Methyl-guanosine
  modified_base 88: mod_base = OTHER; note = 2'-O-Methyl-adenosine
  modified_base 89: mod_base = OTHER; note = 2'-O-Methyl-guanosine
  modified_base 90: mod_base = OTHER; note = 2'-O-Methyl-uridine
  modified_base 91: mod_base = OTHER; note = 2'-O-Methyl-cytidine
  modified_base 92: mod_base = OTHER; note = 2'-O-Methyl-guanosine
  modified_base 93: mod_base = OTHER; note = 2'-O-Methyl-guanosine
  modified_base 94: mod_base = OTHER; note = 2'-O-Methyl-uridine
  modified_base 95: mod_base = OTHER; note = 2'-O-Methyl-guanosine
  modified_base 96: mod_base = OTHER; note = 2'-O-Methyl-cytidine
  modified_base 97: mod_base = OTHER; note = 2'-O-Methyl-uridine
  modified_base 98: mod_base = OTHER; note = 2'-O-Methyl-uridine phosphorothioate
  modified_base 99: mod_base = OTHER; note = 2'-O-Methyl-uridine phosphorothioate
  modified_base 100: mod_base = OTHER; note = 2'-O-Methyl-uridine
  misc_difference 101: note = a, c, g, inosine, u, deoxyadenosine, deoxyguanosine, deoxycytidine, deoxyinosine, thymine, ribonebularine, 2'-O-methylnebularine, or 2'-deoxynebularine
  misc_difference 102: note = a, c, g, inosine, u, deoxyadenosine, deoxyguanosine, deoxycytidine, deoxyinosine, thymine, ribonebularine, 2'-O-methylnebularine, or 2'-deoxynebularine
  misc_difference 103: note = a, c, g, inosine, u, deoxyadenosine, deoxyguanosine, deoxycytidine, deoxyinosine, thymine, ribonebularine, 2'-O-methylnebularine, or 2'-deoxynebularine

SEQ ID NO: 2952 - RNA, 103 nt, synthetic construct; identical to SEQ ID NO: 1797
  source 1..103: mol_type = other RNA
  modified_base 1: mod_base = OTHER; note = 2'-O-Methyl-cytidine phosphorothioate
  modified_base 2: mod_base = OTHER; note = 2'-O-Methyl-adenosine phosphorothioate
  modified_base 3: mod_base = OTHER; note = 2'-O-Methyl-guanosine phosphorothioate
  modified_base 21: mod_base = OTHER; note = 2'-O-Methyl-guanosine
  modified_base 28: mod_base = OTHER; note = 2'-O-Methyl-adenosine
  modified_base 29: mod_base = OTHER; note = 2'-O-Methyl-guanosine
  modified_base 30: mod_base = OTHER; note = 2'-O-Methyl-cytidine
  modified_base 31: mod_base = OTHER; note = 2'-O-Methyl-uridine
  modified_base 32: mod_base = OTHER; note = 2'-O-Methyl-adenosine
  modified_base 33: mod_base = OTHER; note = 2'-O-Methyl-guanosine
  modified_base 34: mod_base = OTHER; note = 2'-O-Methyl-adenosine
  modified_base 35: mod_base = OTHER; note = 2'-O-Methyl-adenosine
  modified_base 36: mod_base = OTHER; note = 2'-O-Methyl-adenosine
  modified_base 37: mod_base = OTHER; note = 2'-O-Methyl-uridine
  modified_base 38: mod_base = OTHER; note = 2'-O-Methyl-adenosine
  modified_base 39: mod_base = OTHER; note = 2'-O-Methyl-guanosine
  modified_base 40: mod_base = OTHER; note = 2'-O-Methyl-cytidine
  modified_base 41: mod_base = OTHER; note = 2'-O-Methyl-adenosine
  modified_base 42: mod_base = OTHER; note = 2'-O-Methyl-adenosine
  modified_base 46: mod_base = OTHER; note = 2'-O-Methyl-adenosine
  modified_base 48: mod_base = OTHER; note = 2'-O-Methyl-adenosine
  modified_base 50: mod_base = OTHER; note = 2'-O-Methyl-uridine
  modified_base 52: mod_base = OTHER; note = 2'-O-Methyl-adenosine
  modified_base 53: mod_base = OTHER; note = 2'-O-Methyl-guanosine
  modified_base 54: mod_base = OTHER; note = 2'-O-Methyl-guanosine
  modified_base 57: mod_base = OTHER; note = 2'-O-Methyl-adenosine
  modified_base 61: mod_base = OTHER; note = 2'-O-Methyl-cytidine
  modified_base 64: mod_base = OTHER; note = uridine phosphorothioate
  modified_base 66: mod_base = OTHER; note = 2'-O-Methyl-uridine
  modified_base 67: mod_base = OTHER; note = 2'-O-Methyl-cytidine
  modified_base 70: mod_base = OTHER; note = 2'-O-Methyl-cytidine
  modified_base 71: mod_base = OTHER; note = 2'-O-Methyl-uridine
  modified_base 72: mod_base = OTHER; note = 2'-O-Methyl-uridine
  modified_base 74: mod_base = OTHER; note = 2'-O-Methyl-adenosine
  modified_base 75: mod_base = OTHER; note = 2'-O-Methyl-adenosine
  modified_base 76: mod_base = OTHER; note = 2'-O-Methyl-adenosine
  modified_base 77: mod_base = OTHER; note = 2'-O-Methyl-adenosine
  modified_base 78: mod_base = OTHER; note = 2'-O-Methyl-adenosine
  modified_base 79: mod_base = OTHER; note = 2'-O-Methyl-guanosine
  modified_base 80: mod_base = OTHER; note = 2'-O-Methyl-uridine
  modified_base 82: mod_base = OTHER; note = 2'-O-Methyl-guanosine
  modified_base 83: mod_base = OTHER; note = 2'-O-Methyl-cytidine
  modified_base 84: mod_base = OTHER; note = 2'-O-Methyl-adenosine
  modified_base 85: mod_base = OTHER; note = 2'-O-Methyl-cytidine
  modified_base 86: mod_base = OTHER; note = 2'-O-Methyl-cytidine
  modified_base 87: mod_base = OTHER; note = 2'-O-Methyl-guanosine
  modified_base 89: mod_base = OTHER; note = 2'-O-Methyl-guanosine
  modified_base 92: mod_base = OTHER; note = 2'-O-Methyl-guanosine
  modified_base 93: mod_base = OTHER; note = 2'-O-Methyl-guanosine
  modified_base 94: mod_base = OTHER; note = 2'-O-Methyl-uridine
  modified_base 95: mod_base = OTHER; note = 2'-O-Methyl-guanosine
  modified_base 96: mod_base = OTHER; note = 2'-O-Methyl-cytidine
  modified_base 97: mod_base = OTHER; note = 2'-O-Methyl-uridine
  modified_base 98: mod_base = OTHER; note = 2'-O-Methyl-uridine phosphorothioate
  modified_base 99: mod_base = OTHER; note = 2'-O-Methyl-uridine phosphorothioate
  modified_base 100: mod_base = OTHER; note = 2'-O-Methyl-uridine
  misc_difference 101: note = a, c, g, inosine, u, deoxyadenosine, deoxyguanosine, deoxycytidine, deoxyinosine, thymine, ribonebularine, 2'-O-methylnebularine, or 2'-deoxynebularine
  misc_difference 102: note = a, c, g, inosine, u, deoxyadenosine, deoxyguanosine, deoxycytidine, deoxyinosine, thymine, ribonebularine, 2'-O-methylnebularine, or 2'-deoxynebularine
  misc_difference 103: note = a, c, g, inosine, u, deoxyadenosine, deoxyguanosine, deoxycytidine, deoxyinosine, thymine, ribonebularine, 2'-O-methylnebularine, or 2'-deoxynebularine

SEQ ID NO: 2953 - RNA, 103 nt, synthetic construct; identical to SEQ ID NO: 1797
  source 1..103: mol_type = other RNA
  modified_base 1: mod_base = OTHER; note = 2'-O-Methyl-cytidine phosphorothioate
  modified_base 2: mod_base = OTHER; note = 2'-O-Methyl-adenosine phosphorothioate
  modified_base 3: mod_base = OTHER; note = 2'-O-Methyl-guanosine phosphorothioate
  modified_base 21: mod_base = OTHER; note = 2'-O-Methyl-guanosine
  modified_base 28: mod_base = OTHER; note = 2'-O-Methyl-adenosine
  modified_base 29: mod_base = OTHER; note = 2'-O-Methyl-guanosine
  modified_base 30: mod_base = OTHER; note = 2'-O-Methyl-cytidine
  modified_base 31: mod_base = OTHER; note = 2'-O-Methyl-uridine
  modified_base 32: mod_base = OTHER; note = 2'-O-Methyl-adenosine
  modified_base 33: mod_base = OTHER; note = 2'-O-Methyl-guanosine
  modified_base 34: mod_base = OTHER; note = 2'-O-Methyl-adenosine
  modified_base 35: mod_base = OTHER; note = 2'-O-Methyl-adenosine
  modified_base 36: mod_base = OTHER; note = 2'-O-Methyl-adenosine
  modified_base 37: mod_base = OTHER; note = 2'-O-Methyl-uridine
  modified_base 38: mod_base = OTHER; note = 2'-O-Methyl-adenosine
  modified_base 39: mod_base = OTHER; note = 2'-O-Methyl-guanosine
  modified_base 40: mod_base = OTHER; note = 2'-O-Methyl-cytidine
  modified_base 41: mod_base = OTHER; note = 2'-O-Methyl-adenosine
  modified_base 42: mod_base = OTHER; note = 2'-O-Methyl-adenosine
  modified_base 46: mod_base = OTHER; note = 2'-O-Methyl-adenosine
  modified_base 48: mod_base = OTHER; note = 2'-O-Methyl-adenosine
  modified_base 50: mod_base = OTHER; note = 2'-O-Methyl-uridine
  modified_base 52: mod_base = OTHER; note = 2'-O-Methyl-adenosine
  modified_base 53: mod_base = OTHER; note = 2'-O-Methyl-guanosine
  modified_base 54: mod_base = OTHER; note = 2'-O-Methyl-guanosine
  modified_base 55: mod_base = OTHER; note = 2'-O-Methyl-cytidine
  modified_base 56: mod_base = OTHER; note = 2'-O-Methyl-uridine
  modified_base 57: mod_base = OTHER; note = 2'-O-Methyl-adenosine
  modified_base 60: mod_base = OTHER; note = 2'-O-Methyl-cytidine
  modified_base 61: mod_base = OTHER; note = 2'-O-Methyl-cytidine
  modified_base 64: mod_base = OTHER; note = uridine phosphorothioate
  modified_base 66: mod_base = OTHER; note = 2'-O-Methyl-uridine
  modified_base 67: mod_base = OTHER; note = 2'-O-Methyl-cytidine
  modified_base 70: mod_base = OTHER; note = 2'-O-Methyl-cytidine
  modified_base 71: mod_base = OTHER; note = 2'-O-Methyl-uridine
  modified_base 72: mod_base = OTHER; note = 2'-O-Methyl-uridine
  modified_base 74: mod_base = OTHER; note = 2'-O-Methyl-adenosine
  modified_base 75: mod_base = OTHER; note = 2'-O-Methyl-adenosine
  modified_base 76: mod_base = OTHER; note = 2'-O-Methyl-adenosine
  modified_base 77: mod_base = OTHER; note = 2'-O-Methyl-adenosine
  modified_base 78: mod_base = OTHER; note = 2'-O-Methyl-adenosine
  modified_base 79: mod_base = OTHER; note = 2'-O-Methyl-guanosine
  modified_base 80: mod_base = OTHER; note = 2'-O-Methyl-uridine
  modified_base 82: mod_base = OTHER; note = 2'-O-Methyl-guanosine
  modified_base 83: mod_base = OTHER; note = 2'-O-Methyl-cytidine
  modified_base 84: mod_base = OTHER; note = 2'-O-Methyl-adenosine
  modified_base 85: mod_base = OTHER; note = 2'-O-Methyl-cytidine
  modified_base 86: mod_base = OTHER; note = 2'-O-Methyl-cytidine
  modified_base 87: mod_base = OTHER; note = 2'-O-Methyl-guanosine
  modified_base 89: mod_base = OTHER; note = 2'-O-Methyl-guanosine
  modified_base 92: mod_base = OTHER; note = 2'-O-Methyl-guanosine
  modified_base 93: mod_base = OTHER; note = 2'-O-Methyl-guanosine
  modified_base 94: mod_base = OTHER; note = 2'-O-Methyl-uridine
  modified_base 95: mod_base = OTHER; note = 2'-O-Methyl-guanosine
  modified_base 96: mod_base = OTHER; note = 2'-O-Methyl-cytidine
  modified_base 97: mod_base = OTHER; note = 2'-O-Methyl-uridine
  modified_base 98: mod_base = OTHER; note = 2'-O-Methyl-uridine phosphorothioate
  modified_base 99: mod_base = OTHER; note = 2'-O-Methyl-uridine phosphorothioate
  modified_base 100: mod_base = OTHER; note = 2'-O-Methyl-uridine
  misc_difference 101: note = a, c, g, inosine, u, deoxyadenosine, deoxyguanosine, deoxycytidine, deoxyinosine, thymine, ribonebularine, 2'-O-methylnebularine, or 2'-deoxynebularine
  misc_difference 102: note = a, c, g, inosine, u, deoxyadenosine, deoxyguanosine, deoxycytidine, deoxyinosine, thymine, ribonebularine, 2'-O-methylnebularine, or 2'-deoxynebularine
  misc_difference 103: note = a, c, g, inosine, u, deoxyadenosine, deoxyguanosine, deoxycytidine, deoxyinosine, thymine, ribonebularine, 2'-O-methylnebularine, or 2'-deoxynebularine

SEQ ID NO: 2954 - RNA, 103 nt, synthetic construct; identical to SEQ ID NO: 1797
  source 1..103: mol_type = other RNA
  modified_base 1: mod_base = OTHER; note = 2'-O-Methyl-cytidine phosphorothioate
  modified_base 2: mod_base = OTHER; note = 2'-O-Methyl-adenosine phosphorothioate
  modified_base 3: mod_base = OTHER; note = 2'-O-Methyl-guanosine phosphorothioate
  modified_base 21: mod_base = OTHER; note = 2'-O-Methyl-guanosine
  modified_base 28: mod_base = OTHER; note = 2'-O-Methyl-adenosine
  modified_base 29: mod_base = OTHER; note = 2'-O-Methyl-guanosine
  modified_base 30: mod_base = OTHER; note = 2'-O-Methyl-cytidine
  modified_base 31: mod_base = OTHER; note = 2'-O-Methyl-uridine
  modified_base 32: mod_base = OTHER; note = 2'-O-Methyl-adenosine
  modified_base 33: mod_base = OTHER; note = 2'-O-Methyl-guanosine
  modified_base 34: mod_base = OTHER; note = 2'-O-Methyl-adenosine
  modified_base 35: mod_base = OTHER; note = 2'-O-Methyl-adenosine
  modified_base 36: mod_base = OTHER; note = 2'-O-Methyl-adenosine
  modified_base 37: mod_base = OTHER; note = 2'-O-Methyl-uridine
  modified_base 38: mod_base = OTHER; note = 2'-O-Methyl-adenosine
  modified_base 39: mod_base = OTHER; note = 2'-O-Methyl-guanosine
  modified_base 40: mod_base = OTHER; note = 2'-O-Methyl-cytidine
  modified_base 41: mod_base = OTHER; note = 2'-O-Methyl-adenosine
  modified_base 42: mod_base = OTHER; note = 2'-O-Methyl-adenosine
  modified_base 46: mod_base = OTHER; note = 2'-O-Methyl-adenosine
  modified_base 48: mod_base = OTHER; note = 2'-O-Methyl-adenosine
  modified_base 50: mod_base = OTHER; note = 2'-O-Methyl-uridine
  modified_base 52: mod_base = OTHER; note = 2'-O-Methyl-adenosine
  modified_base 53: mod_base = OTHER; note = 2'-O-Methyl-guanosine
  modified_base 54: mod_base = OTHER; note = 2'-O-Methyl-guanosine
  modified_base 57: mod_base = OTHER; note = 2'-O-Methyl-adenosine
  modified_base 61: mod_base = OTHER; note = 2'-O-Methyl-cytidine
  modified_base 64: mod_base = OTHER; note = uridine phosphorothioate
  modified_base 66: mod_base = OTHER; note = 2'-O-Methyl-uridine
  modified_base 67: mod_base = OTHER; note = 2'-O-Methyl-cytidine
  modified_base 70: mod_base = OTHER; note = 2'-O-Methyl-cytidine
  modified_base 71: mod_base = OTHER; note = 2'-O-Methyl-uridine
  modified_base 72: mod_base = OTHER; note = 2'-O-Methyl-uridine
  modified_base 73: mod_base = OTHER; note = 2'-O-Methyl-guanosine
  modified_base 74: mod_base = OTHER; note = 2'-O-Methyl-adenosine
  modified_base 75: mod_base = OTHER; note = 2'-O-Methyl-adenosine
  modified_base 76: mod_base = OTHER; note = 2'-O-Methyl-adenosine
  modified_base 77: mod_base = OTHER; note = 2'-O-Methyl-adenosine
  modified_base 78: mod_base = OTHER; note = 2'-O-Methyl-adenosine
  modified_base 79: mod_base = OTHER; note = 2'-O-Methyl-guanosine
  modified_base 80: mod_base = OTHER; note = 2'-O-Methyl-uridine
  modified_base 82: mod_base = OTHER; note = 2'-O-Methyl-guanosine
  modified_base 83: mod_base = OTHER; note = 2'-O-Methyl-cytidine
  modified_base 84: mod_base = OTHER; note = 2'-O-Methyl-adenosine
  modified_base 85: mod_base = OTHER; note = 2'-O-Methyl-cytidine
  modified_base 86: mod_base = OTHER; note = 2'-O-Methyl-cytidine
  modified_base 87: mod_base = OTHER; note = 2'-O-Methyl-guanosine
  modified_base 89: mod_base = OTHER; note = 2'-O-Methyl-guanosine
  modified_base 92: mod_base = OTHER; note = 2'-O-Methyl-guanosine
  modified_base 93: mod_base = OTHER; note = 2'-O-Methyl-guanosine
  modified_base 94: mod_base = OTHER; note = 2'-O-Methyl-uridine
  modified_base 95: mod_base = OTHER; note = 2'-O-Methyl-guanosine
  modified_base 96: mod_base = OTHER; note = 2'-O-Methyl-cytidine
  modified_base 97: mod_base = OTHER; note = 2'-O-Methyl-uridine
  modified_base 98: mod_base = OTHER; note = 2'-O-Methyl-uridine phosphorothioate
  modified_base 99: mod_base = OTHER; note = 2'-O-Methyl-uridine phosphorothioate
  modified_base 100: mod_base = OTHER; note = 2'-O-Methyl-uridine
  misc_difference 101: note = a, c, g, inosine, u, deoxyadenosine, deoxyguanosine, deoxycytidine, deoxyinosine, thymine, ribonebularine, 2'-O-methylnebularine, or 2'-deoxynebularine
  misc_difference 102: note = a, c, g, inosine, u, deoxyadenosine, deoxyguanosine, deoxycytidine, deoxyinosine, thymine, ribonebularine, 2'-O-methylnebularine, or 2'-deoxynebularine
  misc_difference 103: note = a, c, g, inosine, u, deoxyadenosine, deoxyguanosine, deoxycytidine, deoxyinosine, thymine, ribonebularine, 2'-O-methylnebularine, or 2'-deoxynebularine

SEQ ID NO: 2955 - RNA, 103 nt, synthetic construct; identical to SEQ ID NO: 1797
  source 1..103: mol_type = other RNA
  modified_base 1: mod_base = OTHER; note = 2'-O-Methyl-cytidine phosphorothioate
  modified_base 2: mod_base = OTHER; note = 2'-O-Methyl-adenosine phosphorothioate
  modified_base 3: mod_base = OTHER; note = 2'-O-Methyl-guanosine phosphorothioate
  modified_base 21: mod_base = OTHER; note = 2'-O-Methyl-guanosine
  modified_base 28: mod_base = OTHER; note = 2'-O-Methyl-adenosine
  modified_base 29: mod_base = OTHER; note = 2'-O-Methyl-guanosine
  modified_base 30: mod_base = OTHER; note = 2'-O-Methyl-cytidine
  modified_base 31: mod_base = OTHER; note = 2'-O-Methyl-uridine
  modified_base 32: mod_base = OTHER; note = 2'-O-Methyl-adenosine
  modified_base 33: mod_base = OTHER; note = 2'-O-Methyl-guanosine
  modified_base 34: mod_base = OTHER; note = 2'-O-Methyl-adenosine
  modified_base 35: mod_base = OTHER; note = 2'-O-Methyl-adenosine
  modified_base 36: mod_base = OTHER; note = 2'-O-Methyl-adenosine
  modified_base 37: mod_base = OTHER; note = 2'-O-Methyl-uridine
  modified_base 38: mod_base = OTHER; note = 2'-O-Methyl-adenosine
  modified_base 39: mod_base = OTHER; note = 2'-O-Methyl-guanosine
  modified_base 40: mod_base = OTHER; note = 2'-O-Methyl-cytidine
  modified_base 41: mod_base = OTHER; note = 2'-O-Methyl-adenosine
  modified_base 42: mod_base = OTHER; note = 2'-O-Methyl-adenosine
  modified_base 46: mod_base = OTHER; note = 2'-O-Methyl-adenosine
  modified_base 48: mod_base = OTHER; note = 2'-O-Methyl-adenosine
  modified_base 50: mod_base = OTHER; note = 2'-O-Methyl-uridine
  modified_base 52: mod_base = OTHER; note = 2'-O-Methyl-adenosine
  modified_base 53: mod_base = OTHER; note = 2'-O-Methyl-guanosine
  modified_base 54: mod_base = OTHER; note = 2'-O-Methyl-guanosine
  modified_base 57: mod_base = OTHER; note = 2'-O-Methyl-adenosine
  modified_base 61: mod_base = OTHER; note = 2'-O-Methyl-cytidine
  modified_base 64: mod_base = OTHER; note = uridine phosphorothioate
  modified_base 66: mod_base = OTHER; note = 2'-O-Methyl-uridine
  modified_base 67: mod_base = OTHER; note = 2'-O-Methyl-cytidine
  modified_base 70: mod_base = OTHER; note = 2'-O-Methyl-cytidine
  modified_base 71: mod_base = OTHER; note = 2'-O-Methyl-uridine
  modified_base 72: mod_base = OTHER; note = 2'-O-Methyl-uridine
  modified_base 73: mod_base = OTHER; note = 2'-O-Methyl-guanosine
  modified_base 74: mod_base = OTHER; note = 2'-O-Methyl-adenosine
  modified_base 75: mod_base = OTHER; note = 2'-O-Methyl-adenosine
  modified_base 76: mod_base = OTHER; note = 2'-O-Methyl-adenosine
  modified_base 77: mod_base = OTHER; note = 2'-O-Methyl-adenosine
  modified_base 78: mod_base = OTHER; note = 2'-O-Methyl-adenosine
  modified_base 79: mod_base = OTHER; note = 2'-O-Methyl-guanosine
  modified_base 80: mod_base = OTHER; note = 2'-O-Methyl-uridine
  modified_base 82: mod_base = OTHER; note = 2'-O-Methyl-guanosine
  modified_base 83: mod_base = OTHER; note = 2'-O-Methyl-cytidine
  modified_base 84: mod_base = OTHER; note = 2'-O-Methyl-adenosine
  modified_base 85: mod_base = OTHER; note = 2'-O-Methyl-cytidine
  modified_base 86: mod_base = OTHER; note = 2'-O-Methyl-cytidine
  modified_base 87: mod_base = OTHER; note = 2'-O-Methyl-guanosine
  modified_base 89: mod_base = OTHER; note = 2'-O-Methyl-guanosine
  modified_base 91: mod_base = OTHER; note = 2'-O-Methyl-cytidine
  modified_base 92: mod_base = OTHER; note = 2'-O-Methyl-guanosine
  modified_base 93: mod_base = OTHER; note = 2'-O-Methyl-guanosine
  modified_base 94: mod_base = OTHER; note = 2'-O-Methyl-uridine
  modified_base 95: mod_base = OTHER; note = 2'-O-Methyl-guanosine
  modified_base 96: mod_base = OTHER; note = 2'-O-Methyl-cytidine
  modified_base 97: mod_base = OTHER; note = 2'-O-Methyl-uridine
  modified_base 98: mod_base = OTHER; note = 2'-O-Methyl-uridine phosphorothioate
  modified_base 99: mod_base = OTHER; note = 2'-O-Methyl-uridine phosphorothioate
  modified_base 100: mod_base = OTHER; note = 2'-O-Methyl-uridine
  misc_difference 101: note = a, c, g, inosine, u, deoxyadenosine, deoxyguanosine, deoxycytidine, deoxyinosine, thymine, ribonebularine, 2'-O-methylnebularine, or 2'-deoxynebularine
  misc_difference 102: note = a, c, g, inosine, u, deoxyadenosine, deoxyguanosine, deoxycytidine, deoxyinosine, thymine, ribonebularine, 2'-O-methylnebularine, or 2'-deoxynebularine
  misc_difference 103: note = a, c, g, inosine, u, deoxyadenosine, deoxyguanosine, deoxycytidine, deoxyinosine, thymine, ribonebularine, 2'-O-methylnebularine, or 2'-deoxynebularine

SEQ ID NO: 2956 - RNA, 103 nt, synthetic construct; identical to SEQ ID NO: 1797
  source 1..103: mol_type = other RNA
  modified_base 1: mod_base = OTHER; note = 2'-O-Methyl-cytidine phosphorothioate
  modified_base 2: mod_base = OTHER; note = 2'-O-Methyl-adenosine phosphorothioate
  modified_base 3: mod_base = OTHER; note = 2'-O-Methyl-guanosine phosphorothioate
  modified_base 21: mod_base = OTHER; note = 2'-O-Methyl-guanosine
  modified_base 28: mod_base = OTHER; note = 2'-O-Methyl-adenosine
  modified_base 29: mod_base = OTHER; note = 2'-O-Methyl-guanosine
  modified_base 30: mod_base = OTHER; note = 2'-O-Methyl-cytidine
  modified_base 31: mod_base = OTHER; note = 2'-O-Methyl-uridine
  modified_base 32: mod_base = OTHER; note = 2'-O-Methyl-adenosine
  modified_base 34: mod_base = OTHER; note = 2'-O-Methyl-adenosine
  modified_base 35: mod_base = OTHER; note = 2'-O-Methyl-adenosine
  modified_base 36: mod_base = OTHER; note = 2'-O-Methyl-adenosine
  modified_base 37: mod_base = OTHER; note = 2'-O-Methyl-uridine
  modified_base 38: mod_base = OTHER; note = 2'-O-Methyl-adenosine
  modified_base 39: mod_base = OTHER; note = 2'-O-Methyl-guanosine
  modified_base 40: mod_base = OTHER; note = 2'-O-Methyl-cytidine
  modified_base 41: mod_base = OTHER; note = 2'-O-Methyl-adenosine
  modified_base 42: mod_base = OTHER; note = 2'-O-Methyl-adenosine
  modified_base 46: mod_base = OTHER; note = 2'-O-Methyl-adenosine
  modified_base 48: mod_base = OTHER; note = 2'-O-Methyl-adenosine
  modified_base 50: mod_base = OTHER; note = 2'-O-Methyl-uridine
  modified_base 52: mod_base = OTHER; note = 2'-O-Methyl-adenosine
  modified_base 53: mod_base = OTHER; note = 2'-O-Methyl-guanosine
  modified_base 54: mod_base = OTHER; note = 2'-O-Methyl-guanosine
  modified_base 57: mod_base = OTHER; note = 2'-O-Methyl-adenosine
  modified_base 61: mod_base = OTHER; note = 2'-O-Methyl-cytidine
  modified_base 64: mod_base = OTHER; note = uridine phosphorothioate
  modified_base 66: mod_base = OTHER; note = 2'-O-Methyl-uridine
  modified_base 67: mod_base = OTHER; note = 2'-O-Methyl-cytidine
  modified_base 70: mod_base = OTHER; note = 2'-O-Methyl-cytidine
  modified_base 71: mod_base = OTHER; note = 2'-O-Methyl-uridine
  modified_base 72: mod_base = OTHER; note = 2'-O-Methyl-uridine
  modified_base 73: mod_base = OTHER; note = 2'-O-Methyl-guanosine
  modified_base 74: mod_base = OTHER; note = 2'-O-Methyl-adenosine
  modified_base 75: mod_base = OTHER; note = 2'-O-Methyl-adenosine
  modified_base 76: mod_base = OTHER; note = 2'-O-Methyl-adenosine
  modified_base 77: mod_base = OTHER; note = 2'-O-Methyl-adenosine
  modified_base 78: mod_base = OTHER; note = 2'-O-Methyl-adenosine
  modified_base 79: mod_base = OTHER; note = 2'-O-Methyl-guanosine
  modified_base 80: mod_base = OTHER; note = 2'-O-Methyl-uridine
  modified_base 82: mod_base = OTHER; note = 2'-O-Methyl-guanosine
  modified_base 83: mod_base = OTHER; note = 2'-O-Methyl-cytidine
  modified_base 84: mod_base = OTHER; note = 2'-O-Methyl-adenosine
  modified_base 85: mod_base = OTHER; note = 2'-O-Methyl-cytidine
  modified_base 86: mod_base = OTHER; note = 2'-O-Methyl-cytidine
  modified_base 87: mod_base = OTHER; note = 2'-O-Methyl-guanosine
  modified_base 89: mod_base = OTHER; note = 2'-O-Methyl-guanosine
  modified_base 92: mod_base = OTHER; note = 2'-O-Methyl-guanosine
  modified_base 93: mod_base = OTHER; note = 2'-O-Methyl-guanosine
  modified_base 94: mod_base = OTHER; note = 2'-O-Methyl-uridine
  modified_base 95: mod_base = OTHER; note = 2'-O-Methyl-guanosine
  modified_base 96: mod_base = OTHER; note = 2'-O-Methyl-cytidine
  modified_base 97: mod_base = OTHER; note = 2'-O-Methyl-uridine
  modified_base 98: mod_base = OTHER; note = 2'-O-Methyl-uridine phosphorothioate
  modified_base 99: mod_base = OTHER; note = 2'-O-Methyl-uridine phosphorothioate
  modified_base 100: mod_base = OTHER; note = 2'-O-Methyl-uridine
  misc_difference 101: note = a, c, g, inosine, u, deoxyadenosine, deoxyguanosine, deoxycytidine, deoxyinosine, thymine, ribonebularine, 2'-O-methylnebularine, or 2'-deoxynebularine
  misc_difference 102: note = a, c, g, inosine, u, deoxyadenosine, deoxyguanosine, deoxycytidine, deoxyinosine, thymine, ribonebularine, 2'-O-methylnebularine, or 2'-deoxynebularine
  misc_difference 103: note = a, c, g, inosine, u, deoxyadenosine, deoxyguanosine, deoxycytidine, deoxyinosine, thymine, ribonebularine, 2'-O-methylnebularine, or 2'-deoxynebularine

SEQ ID NO: 2957 - RNA, 103 nt, synthetic construct; identical to SEQ ID NO: 1797
  source 1..103: mol_type = other RNA
  modified_base 1: mod_base = OTHER; note = 2'-O-Methyl-cytidine phosphorothioate
  modified_base 2: mod_base = OTHER; note = 2'-O-Methyl-adenosine phosphorothioate
  modified_base 3: mod_base = OTHER; note = 2'-O-Methyl-guanosine phosphorothioate
  modified_base 21: mod_base = OTHER; note = 2'-O-Methyl-guanosine
  modified_base 28: mod_base = OTHER; note = 2'-O-Methyl-adenosine
  modified_base 29: mod_base = OTHER; note = 2'-O-Methyl-guanosine
  modified_base 30: mod_base = OTHER; note = 2'-O-Methyl-cytidine
  modified_base 31: mod_base = OTHER; note = 2'-O-Methyl-uridine
  modified_base 32: mod_base = OTHER; note = 2'-O-Methyl-adenosine
  modified_base 34: mod_base = OTHER; note = 2'-O-Methyl-adenosine
  modified_base 35: mod_base = OTHER; note = 2'-O-Methyl-adenosine
  modified_base 36: mod_base = OTHER; note = 2'-O-Methyl-adenosine
  modified_base 37: mod_base = OTHER; note = 2'-O-Methyl-uridine
  modified_base 38: mod_base = OTHER; note = 2'-O-Methyl-adenosine
  modified_base 39: mod_base = OTHER; note = 2'-O-Methyl-guanosine
  modified_base 40: mod_base = OTHER; note = 2'-O-Methyl-cytidine
  modified_base 41: mod_base = OTHER; note = 2'-O-Methyl-adenosine
  modified_base 42: mod_base = OTHER; note = 2'-O-Methyl-adenosine
  modified_base 46: mod_base = OTHER; note = 2'-O-Methyl-adenosine
  modified_base 48: mod_base = OTHER; note = 2'-O-Methyl-adenosine
  modified_base 50: mod_base = OTHER; note = 2'-O-Methyl-uridine
  modified_base 52: mod_base = OTHER; note = 2'-O-Methyl-adenosine
  modified_base 53: mod_base = OTHER; note = 2'-O-Methyl-guanosine
  modified_base 54: mod_base = OTHER; note = 2'-O-Methyl-guanosine
  modified_base 57: mod_base = OTHER; note = 2'-O-Methyl-adenosine
  modified_base 61: mod_base = OTHER; note = 2'-O-Methyl-cytidine
  modified_base 64: mod_base = OTHER; note = uridine phosphorothioate
  modified_base 66: mod_base = OTHER; note = 2'-O-Methyl-uridine
  modified_base 67: mod_base = OTHER; note = 2'-O-Methyl-cytidine
  modified_base 70: mod_base = OTHER; note = 2'-O-Methyl-cytidine
  modified_base 71: mod_base = OTHER; note = 2'-O-Methyl-uridine
  modified_base 72: mod_base = OTHER; note = 2'-O-Methyl-uridine
  modified_base 73: mod_base = OTHER; note = 2'-O-Methyl-guanosine
  modified_base 74: mod_base = OTHER; note = 2'-O-Methyl-adenosine
  modified_base 75: mod_base = OTHER; note = 2'-O-Methyl-adenosine
  modified_base 76: mod_base = OTHER; note = 2'-O-Methyl-adenosine
  modified_base 77: mod_base = OTHER; note = 2'-O-Methyl-adenosine
  modified_base 78: mod_base = OTHER; note = 2'-O-Methyl-adenosine
  modified_base 79: mod_base = OTHER; note = 2'-O-Methyl-guanosine
  modified_base 80: mod_base = OTHER; note = 2'-O-Methyl-uridine
  modified_base 82: mod_base = OTHER; note = 2'-O-Methyl-guanosine
  modified_base 83: mod_base = OTHER; note = 2'-O-Methyl-cytidine
  modified_base 84: mod_base = OTHER; note = 2'-O-Methyl-adenosine
  modified_base 85: mod_base = OTHER; note = 2'-O-Methyl-cytidine
  modified_base 86: mod_base = OTHER; note = 2'-O-Methyl-cytidine
  modified_base 87: mod_base = OTHER; note = 2'-O-Methyl-guanosine
  modified_base 89: mod_base = OTHER; note = 2'-O-Methyl-guanosine
  modified_base 91: mod_base = OTHER; note = 2'-O-Methyl-cytidine
  modified_base 92: mod_base = OTHER; note = 2'-O-Methyl-guanosine
  modified_base 93: mod_base = OTHER; note = 2'-O-Methyl-guanosine
  modified_base 94: mod_base = OTHER; note = 2'-O-Methyl-uridine
  modified_base 95: mod_base = OTHER; note = 2'-O-Methyl-guanosine
  modified_base 96: mod_base = OTHER; note = 2'-O-Methyl-cytidine
  modified_base 97: mod_base = OTHER; note = 2'-O-Methyl-uridine
  modified_base 98: mod_base = OTHER; note = 2'-O-Methyl-uridine phosphorothioate
  modified_base 99: mod_base = OTHER; note = 2'-O-Methyl-uridine phosphorothioate
  modified_base 100: mod_base = OTHER; note = 2'-O-Methyl-uridine
  misc_difference 101: note = a, c, g, inosine, u, deoxyadenosine, deoxyguanosine, deoxycytidine, deoxyinosine, thymine, ribonebularine, 2'-O-methylnebularine, or 2'-deoxynebularine
  misc_difference 102: note = a, c, g, inosine, u, deoxyadenosine, deoxyguanosine, deoxycytidine, deoxyinosine, thymine, ribonebularine, 2'-O-methylnebularine, or 2'-deoxynebularine
  misc_difference 103: note = a, c, g, inosine, u, deoxyadenosine, deoxyguanosine, deoxycytidine, deoxyinosine, thymine, ribonebularine, 2'-O-methylnebularine, or 2'-deoxynebularine

SEQ ID NO: 2958 - RNA, 103 nt, synthetic construct; identical to SEQ ID NO: 1797
  source 1..103: mol_type = other RNA
  modified_base 1: mod_base = OTHER; note = 2'-O-Methyl-cytidine phosphorothioate
  modified_base 2: mod_base = OTHER; note = 2'-O-Methyl-adenosine phosphorothioate
  modified_base 3: mod_base = OTHER; note = 2'-O-Methyl-guanosine phosphorothioate
  modified_base 21: mod_base = OTHER; note = 2'-O-Methyl-guanosine
  modified_base 28: mod_base = OTHER; note = 2'-O-Methyl-adenosine
  modified_base 29: mod_base = OTHER; note = 2'-O-Methyl-guanosine
  modified_base 30: mod_base = OTHER; note = 2'-O-Methyl-cytidine
  modified_base 31: mod_base = OTHER; note = 2'-O-Methyl-uridine
  modified_base 32: mod_base = OTHER; note = 2'-O-Methyl-adenosine
  modified_base 34: mod_base = OTHER; note = 2'-O-Methyl-adenosine
  modified_base 35: mod_base = OTHER; note = 2'-O-Methyl-adenosine
  modified_base 36: mod_base = OTHER; note = 2'-O-Methyl-adenosine
  modified_base 37: mod_base = OTHER; note = 2'-O-Methyl-uridine
  modified_base 38: mod_base = OTHER; note = 2'-O-Methyl-adenosine
  modified_base 39: mod_base = OTHER; note = 2'-O-Methyl-guanosine
  modified_base 40: mod_base = OTHER; note = 2'-O-Methyl-cytidine
  modified_base 41: mod_base = OTHER; note = 2'-O-Methyl-adenosine
  modified_base 42: mod_base = OTHER; note = 2'-O-Methyl-adenosine
  modified_base 46: mod_base = OTHER; note = 2'-O-Methyl-adenosine
  modified_base 48: mod_base = OTHER; note = 2'-O-Methyl-adenosine
  modified_base 50: mod_base = OTHER; note = 2'-O-Methyl-uridine
  modified_base 52: mod_base = OTHER; note = 2'-O-Methyl-adenosine
  modified_base 53: mod_base = OTHER; note = 2'-O-Methyl-guanosine
  modified_base 54: mod_base = OTHER; note = 2'-O-Methyl-guanosine
  modified_base 55: mod_base = OTHER; note = 2'-O-Methyl-cytidine
  modified_base 56: mod_base = OTHER; note = 2'-O-Methyl-uridine
  modified_base 57: mod_base = OTHER; note = 2'-O-Methyl-adenosine
  modified_base 60: mod_base = OTHER; note = 2'-O-Methyl-cytidine
  modified_base 61: mod_base = OTHER; note = 2'-O-Methyl-cytidine
  modified_base 64: mod_base = OTHER; note = uridine phosphorothioate
  modified_base 66: mod_base = OTHER; note = 2'-O-Methyl-uridine
  modified_base 67: mod_base = OTHER; note = 2'-O-Methyl-cytidine
  modified_base 70: mod_base = OTHER; note = 2'-O-Methyl-cytidine
  modified_base 71: mod_base = OTHER; note = 2'-O-Methyl-uridine
  modified_base 72: mod_base = OTHER; note = 2'-O-Methyl-uridine
  modified_base 74: mod_base = OTHER; note = 2'-O-Methyl-adenosine
  modified_base 75: mod_base = OTHER; note = 2'-O-Methyl-adenosine
  modified_base 76: mod_base = OTHER; note = 2'-O-Methyl-adenosine
  modified_base 77: mod_base = OTHER; note = 2'-O-Methyl-adenosine
  modified_base 78: mod_base = OTHER; note = 2'-O-Methyl-adenosine
  modified_base 79: mod_base = OTHER; note = 2'-O-Methyl-guanosine
  modified_base 80: mod_base = OTHER; note = 2'-O-Methyl-uridine
  modified_base 82: mod_base = OTHER; note = 2'-O-Methyl-guanosine
  modified_base 83: mod_base = OTHER; note = 2'-O-Methyl-cytidine
  modified_base 84: mod_base = OTHER; note = 2'-O-Methyl-adenosine
  modified_base 85: mod_base = OTHER; note = 2'-O-Methyl-cytidine
  modified_base 86: mod_base = OTHER; note = 2'-O-Methyl-cytidine
  modified_base 87: mod_base = OTHER; note = 2'-O-Methyl-guanosine
  modified_base 89: mod_base = OTHER; note = 2'-O-Methyl-guanosine
  modified_base 92: mod_base = OTHER; note = 2'-O-Methyl-guanosine
  modified_base 93: mod_base = OTHER; note = 2'-O-Methyl-guanosine
  modified_base 94: mod_base = OTHER; note = 2'-O-Methyl-uridine
  modified_base 95: mod_base = OTHER; note = 2'-O-Methyl-guanosine
  modified_base 96: mod_base = OTHER; note = 2'-O-Methyl-cytidine
  modified_base 97: mod_base = OTHER; note = 2'-O-Methyl-uridine
  modified_base 98: mod_base = OTHER; note = 2'-O-Methyl-uridine phosphorothioate
  modified_base 99: mod_base = OTHER; note = 2'-O-Methyl-uridine phosphorothioate
  modified_base 100: mod_base = OTHER; note = 2'-O-Methyl-uridine
  misc_difference 101: note = a, c, g, inosine, u, deoxyadenosine, deoxyguanosine, deoxycytidine, deoxyinosine, thymine, ribonebularine, 2'-O-methylnebularine, or 2'-deoxynebularine
  misc_difference 102: note = a, c, g, inosine, u, deoxyadenosine, deoxyguanosine, deoxycytidine, deoxyinosine, thymine, ribonebularine, 2'-O-methylnebularine, or 2'-deoxynebularine
  misc_difference 103: note = a, c, g, inosine, u, deoxyadenosine, deoxyguanosine, deoxycytidine, deoxyinosine, thymine, ribonebularine, 2'-O-methylnebularine, or 2'-deoxynebularine

SEQ ID NO: 2959 - RNA, 103 nt, synthetic construct; identical to SEQ ID NO: 1795
  source 1..103: mol_type = other RNA
  modified_base 1: mod_base = OTHER; note = 2'-O-Methyl-cytidine phosphorothioate
  modified_base 2: mod_base = OTHER; note = 2'-O-Methyl-cytidine phosphorothioate
  modified_base 3: mod_base = OTHER; note = 2'-O-Methyl-cytidine phosphorothioate
  modified_base 21: mod_base = OTHER; note = 2'-O-Methyl-guanosine
  modified_base 28: mod_base = OTHER; note = 2'-O-Methyl-adenosine
  modified_base 29: mod_base = OTHER; note = 2'-O-Methyl-guanosine
  modified_base 30: mod_base = OTHER; note = 2'-O-Methyl-cytidine
  modified_base 31: mod_base = OTHER; note = 2'-O-Methyl-uridine
  modified_base 32: mod_base = OTHER; note = 2'-O-Methyl-adenosine
  modified_base 33: mod_base = OTHER; note = 2'-O-Methyl-guanosine
  modified_base 34: mod_base = OTHER; note = 2'-O-Methyl-adenosine
  modified_base 35: mod_base = OTHER; note = 2'-O-Methyl-adenosine
  modified_base 36: mod_base = OTHER; note = 2'-O-Methyl-adenosine
  modified_base 37: mod_base = OTHER; note = 2'-O-Methyl-uridine
  modified_base 38: mod_base = OTHER; note = 2'-O-Methyl-adenosine
  modified_base 39: mod_base = OTHER; note = 2'-O-Methyl-guanosine
  modified_base 40: mod_base = OTHER; note = 2'-O-Methyl-cytidine
  modified_base 41: mod_base = OTHER; note = 2'-O-Methyl-adenosine
  modified_base 42: mod_base = OTHER; note = 2'-O-Methyl-adenosine
  modified_base 45: mod_base = OTHER; note = uridine phosphorothioate
  modified_base 46: mod_base = OTHER; note = 2'-O-Methyl-adenosine
  modified_base 48: mod_base = OTHER; note = 2'-O-Methyl-adenosine
  modified_base 50: mod_base = OTHER; note = 2'-O-Methyl-uridine
  modified_base 52: mod_base = OTHER; note = 2'-O-Methyl-adenosine
  modified_base 53: mod_base = OTHER; note = 2'-O-Methyl-guanosine
  modified_base 54: mod_base = OTHER; note = 2'-O-Methyl-guanosine
  modified_base 55: mod_base = OTHER; note = 2'-O-Methyl-cytidine
  modified_base 56: mod_base = OTHER; note = 2'-O-Methyl-uridine
  modified_base 57: mod_base = OTHER; note = 2'-O-Methyl-adenosine
  modified_base 60: mod_base = OTHER; note = 2'-O-Methyl-cytidine
  modified_base 61: mod_base = OTHER; note = 2'-O-Methyl-cytidine
  modified_base 66: mod_base = OTHER; note = 2'-O-Methyl-uridine
  modified_base 67: mod_base = OTHER; note = 2'-O-Methyl-cytidine
  modified_base 70: mod_base = OTHER; note = 2'-O-Methyl-cytidine
  modified_base 71: mod_base = OTHER; note = 2'-O-Methyl-uridine
  modified_base 72: mod_base = OTHER; note = 2'-O-Methyl-uridine
  modified_base 73: mod_base = OTHER; note = 2'-O-Methyl-guanosine
  modified_base 74: mod_base = OTHER; note = 2'-O-Methyl-adenosine
  modified_base 75: mod_base = OTHER; note = 2'-O-Methyl-adenosine
  modified_base 76: mod_base = OTHER; note = 2'-O-Methyl-adenosine
  modified_base 77: mod_base = OTHER; note = 2'-O-Methyl-adenosine
  modified_base 78: mod_base = OTHER; note = 2'-O-Methyl-adenosine
  modified_base 79: mod_base = OTHER; note = 2'-O-Methyl-guanosine
  modified_base 80: mod_base = OTHER; note = 2'-O-Methyl-uridine
  modified_base 81: mod_base = OTHER; note = 2'-O-Methyl-guanosine
  modified_base 83: mod_base = OTHER; note = 2'-O-Methyl-cytidine
  modified_base 84: mod_base = OTHER; note = 2'-O-Methyl-adenosine
  modified_base 85: mod_base = OTHER; note = 2'-O-Methyl-cytidine
  modified_base 86: mod_base = OTHER; note = 2'-O-Methyl-cytidine
  modified_base 87: mod_base = OTHER; note = 2'-O-Methyl-guanosine
  modified_base 88: mod_base = OTHER; note = 2'-O-Methyl-adenosine
  modified_base 89: mod_base = OTHER; note = 2'-O-Methyl-guanosine
  modified_base 90: mod_base = OTHER; note = 2'-O-Methyl-uridine
  modified_base 91: mod_base = OTHER; note = 2'-O-Methyl-cytidine
  modified_base 92: mod_base = OTHER; note = 2'-O-Methyl-guanosine
  modified_base 93: mod_base = OTHER; note = 2'-O-Methyl-guanosine
  modified_base 94: mod_base = OTHER; note = 2'-O-Methyl-uridine
  modified_base 95: mod_base = OTHER; note = 2'-O-Methyl-guanosine
  modified_base 96: mod_base = OTHER; note = 2'-O-Methyl-cytidine
  modified_base 97: mod_base = OTHER; note = 2'-O-Methyl-uridine
  modified_base 98: mod_base = OTHER; note = 2'-O-Methyl-uridine phosphorothioate
  modified_base 99: mod_base = OTHER; note = 2'-O-Methyl-uridine phosphorothioate
  modified_base 100: mod_base = OTHER; note = 2'-O-Methyl-uridine
  misc_difference 101: note = a, c, g, inosine, u, deoxyadenosine, deoxyguanosine, deoxycytidine, deoxyinosine, thymine, ribonebularine, 2'-O-methylnebularine, or 2'-deoxynebularine
  misc_difference 102: note = a, c, g, inosine, u, deoxyadenosine, deoxyguanosine, deoxycytidine, deoxyinosine, thymine, ribonebularine, 2'-O-methylnebularine, or 2'-deoxynebularine
  misc_difference 103: note = a, c, g, inosine, u, deoxyadenosine, deoxyguanosine, deoxycytidine, deoxyinosine, thymine, ribonebularine, 2'-O-methylnebularine, or 2'-deoxynebularine

SEQ ID NO: 2960 - RNA, 103 nt, synthetic construct; identical to SEQ ID NO: 1795
  source 1..103: mol_type = other RNA
  modified_base 1: mod_base = OTHER; note = 2'-O-Methyl-cytidine phosphorothioate
  modified_base 2: mod_base = OTHER; note = 2'-O-Methyl-cytidine phosphorothioate
  modified_base 3: mod_base = OTHER; note = 2'-O-Methyl-cytidine phosphorothioate
  modified_base 21: mod_base = OTHER; note = 2'-O-Methyl-guanosine
  modified_base 28: mod_base = OTHER; note = 2'-O-Methyl-adenosine
  modified_base 29: mod_base = OTHER; note = 2'-O-Methyl-guanosine
  modified_base 30: mod_base = OTHER; note = 2'-O-Methyl-cytidine
  modified_base 31: mod_base = OTHER; note = 2'-O-Methyl-uridine
  modified_base 32: mod_base = OTHER; note = 2'-O-Methyl-adenosine
  modified_base 34: mod_base = OTHER; note = 2'-O-Methyl-adenosine
  modified_base 35: mod_base = OTHER; note = 2'-O-Methyl-adenosine
  modified_base 36: mod_base = OTHER; note = 2'-O-Methyl-adenosine
  modified_base 37: mod_base = OTHER; note = 2'-O-Methyl-uridine
  modified_base 38: mod_base = OTHER; note = 2'-O-Methyl-adenosine
  modified_base 39: mod_base = OTHER; note = 2'-O-Methyl-guanosine
  modified_base 40: mod_base = OTHER; note = 2'-O-Methyl-cytidine
  modified_base 41: mod_base = OTHER; note = 2'-O-Methyl-adenosine
  modified_base 42: mod_base = OTHER; note = 2'-O-Methyl-adenosine
  modified_base 45: mod_base = OTHER; note = uridine phosphorothioate
  modified_base 46: mod_base = OTHER; note = 2'-O-Methyl-adenosine
  modified_base 48: mod_base = OTHER; note = 2'-O-Methyl-adenosine
  modified_base 50: mod_base = OTHER; note = 2'-O-Methyl-uridine
  modified_base 52: mod_base = OTHER; note = 2'-O-Methyl-adenosine
  modified_base 53: mod_base = OTHER; note = 2'-O-Methyl-guanosine
  modified_base 54: mod_base = OTHER; note = 2'-O-Methyl-guanosine
  modified_base 55: mod_base = OTHER; note = 2'-O-Methyl-cytidine
  modified_base 56: mod_base = OTHER; note = 2'-O-Methyl-uridine
  modified_base 57: mod_base = OTHER; note = 2'-O-Methyl-adenosine
  modified_base 60: mod_base = OTHER; note = 2'-O-Methyl-cytidine
  modified_base 61: mod_base = OTHER; note = 2'-O-Methyl-cytidine
  modified_base 66: mod_base = OTHER; note = 2'-O-Methyl-uridine
  modified_base 67: mod_base = OTHER; note = 2'-O-Methyl-cytidine
  modified_base 70: mod_base = OTHER; note = 2'-O-Methyl-cytidine
  modified_base 71: mod_base = OTHER; note = 2'-O-Methyl-uridine
  modified_base 72: mod_base = OTHER; note = 2'-O-Methyl-uridine
  modified_base 74: mod_base = OTHER; note = 2'-O-Methyl-adenosine
  modified_base 75: mod_base = OTHER; note = 2'-O-Methyl-adenosine
  modified_base 76: mod_base = OTHER; note = 2'-O-Methyl-adenosine
  modified_base 77: mod_base = OTHER; note = 2'-O-Methyl-adenosine
  modified_base 78: mod_base = OTHER; note = 2'-O-Methyl-adenosine
  modified_base 79: mod_base = OTHER; note = 2'-O-Methyl-guanosine
  modified_base 80: mod_base = OTHER; note = 2'-O-Methyl-uridine
  modified_base 81: mod_base = OTHER; note = 2'-O-Methyl-guanosine
  modified_base 83: mod_base = OTHER; note = 2'-O-Methyl-cytidine
  modified_base 84: mod_base = OTHER; note = 2'-O-Methyl-adenosine
  modified_base 85: mod_base = OTHER; note = 2'-O-Methyl-cytidine
  modified_base 86: mod_base = OTHER; note = 2'-O-Methyl-cytidine
  modified_base 87: mod_base = OTHER; note = 2'-O-Methyl-guanosine
  modified_base 88: mod_base = OTHER; note = 2'-O-Methyl-adenosine
  modified_base 89: mod_base = OTHER; note = 2'-O-Methyl-guanosine
  modified_base 90: mod_base = OTHER; note = 2'-O-Methyl-uridine
  modified_base 91: mod_base = OTHER; note = 2'-O-Methyl-cytidine
  modified_base 92: mod_base = OTHER; note = 2'-O-Methyl-guanosine
  modified_base 93: mod_base = OTHER; note = 2'-O-Methyl-guanosine
  modified_base 94: mod_base = OTHER; note = 2'-O-Methyl-uridine
  modified_base 95: mod_base = OTHER; note = 2'-O-Methyl-guanosine
  modified_base 96: mod_base = OTHER; note = 2'-O-Methyl-cytidine
  modified_base 97: mod_base = OTHER; note = 2'-O-Methyl-uridine
  modified_base 98: mod_base = OTHER; note = 2'-O-Methyl-uridine phosphorothioate
  modified_base 99: mod_base = OTHER; note = 2'-O-Methyl-uridine phosphorothioate
  modified_base 100: mod_base = OTHER; note = 2'-O-Methyl-uridine
  misc_difference 101: note = a, c, g, inosine, u, deoxyadenosine, deoxyguanosine, deoxycytidine, deoxyinosine, thymine, ribonebularine, 2'-O-methylnebularine, or 2'-deoxynebularine
  misc_difference 102: note = a, c, g, inosine, u, deoxyadenosine, deoxyguanosine, deoxycytidine, deoxyinosine, thymine, ribonebularine, 2'-O-methylnebularine, or 2'-deoxynebularine
  misc_difference 103: note = a, c, g, inosine, u, deoxyadenosine, deoxyguanosine, deoxycytidine, deoxyinosine, thymine, ribonebularine, 2'-O-methylnebularine, or 2'-deoxynebularine

SEQ ID NO: 2961 - RNA, 103 nt, synthetic construct; identical to SEQ ID NO: 1796
  source 1..103: mol_type = other RNA
  modified_base 1: mod_base = OTHER; note = 2'-O-Methyl-guanosine phosphorothioate
  modified_base 2: mod_base = OTHER; note = 2'-O-Methyl-adenosine phosphorothioate
  modified_base 3: mod_base = OTHER; note = 2'-O-Methyl-guanosine phosphorothioate
  modified_base 21: mod_base = OTHER; note = 2'-O-Methyl-guanosine
  modified_base 28: mod_base = OTHER; note = 2'-O-Methyl-adenosine
  modified_base 29: mod_base = OTHER; note = 2'-O-Methyl-guanosine
  modified_base 30: mod_base = OTHER; note = 2'-O-Methyl-cytidine
  modified_base 31: mod_base = OTHER; note = 2'-O-Methyl-uridine
  modified_base 32: mod_base = OTHER; note = 2'-O-Methyl-adenosine
  modified_base 33: mod_base = OTHER; note = 2'-O-Methyl-guanosine
  modified_base 34: mod_base = OTHER; note = 2'-O-Methyl-adenosine
  modified_base 35: mod_base = OTHER; note = 2'-O-Methyl-adenosine
  modified_base 36: mod_base = OTHER; note = 2'-O-Methyl-adenosine
  modified_base 37: mod_base = OTHER; note = 2'-O-Methyl-uridine
  modified_base 38: mod_base = OTHER; note = 2'-O-Methyl-adenosine
  modified_base 39: mod_base = OTHER; note = 2'-O-Methyl-guanosine
  modified_base 40: mod_base = OTHER; note = 2'-O-Methyl-cytidine
  modified_base 41: mod_base = OTHER; note = 2'-O-Methyl-adenosine
  modified_base 42: mod_base = OTHER; note = 2'-O-Methyl-adenosine
  modified_base 45: mod_base = OTHER; note = uridine phosphorothioate
  modified_base 46: mod_base = OTHER; note = 2'-O-Methyl-adenosine
  modified_base 48: mod_base = OTHER; note = 2'-O-Methyl-adenosine
  modified_base 50: mod_base = OTHER; note = 2'-O-Methyl-uridine
  modified_base 52: mod_base = OTHER; note = 2'-O-Methyl-adenosine
  modified_base 53: mod_base = OTHER; note = 2'-O-Methyl-guanosine
  modified_base 54: mod_base = OTHER; note = 2'-O-Methyl-guanosine
  modified_base 55: mod_base = OTHER; note = 2'-O-Methyl-cytidine
  modified_base 56: mod_base = OTHER; note = 2'-O-Methyl-uridine
  modified_base 57: mod_base = OTHER; note = 2'-O-Methyl-adenosine
  modified_base 60: mod_base = OTHER; note = 2'-O-Methyl-cytidine
  modified_base 61: mod_base = OTHER; note = 2'-O-Methyl-cytidine
  modified_base 66: mod_base = OTHER; note = 2'-O-Methyl-uridine
  modified_base 67: mod_base = OTHER; note = 2'-O-Methyl-cytidine
  modified_base 70: mod_base = OTHER; note = 2'-O-Methyl-cytidine
  modified_base 71: mod_base = OTHER; note = 2'-O-Methyl-uridine
  modified_base 72: mod_base = OTHER; note = 2'-O-Methyl-uridine
  modified_base 73: mod_base = OTHER; note = 2'-O-Methyl-guanosine
  modified_base 74: mod_base = OTHER; note = 2'-O-Methyl-adenosine
  modified_base 75: mod_base = OTHER; note = 2'-O-Methyl-adenosine
  modified_base 76: mod_base = OTHER; note = 2'-O-Methyl-adenosine
  modified_base 77: mod_base = OTHER; note = 2'-O-Methyl-adenosine
  modified_base 78: mod_base = OTHER; note = 2'-O-Methyl-adenosine
  modified_base 79: mod_base = OTHER; note = 2'-O-Methyl-guanosine
  modified_base 80: mod_base = OTHER; note = 2'-O-Methyl-uridine
  modified_base 81: mod_base = OTHER; note = 2'-O-Methyl-guanosine
  modified_base 83: mod_base = OTHER; note = 2'-O-Methyl-cytidine
  modified_base 84: mod_base = OTHER; note = 2'-O-Methyl-adenosine
  modified_base 85: mod_base = OTHER; note = 2'-O-Methyl-cytidine
  modified_base 86: mod_base = OTHER; note = 2'-O-Methyl-cytidine
  modified_base 87: mod_base = OTHER; note = 2'-O-Methyl-guanosine
  modified_base 88: mod_base = OTHER; note = 2'-O-Methyl-adenosine
  modified_base 89: mod_base = OTHER; note = 2'-O-Methyl-guanosine
  modified_base 90: mod_base = OTHER; note = 2'-O-Methyl-uridine
  modified_base 91: mod_base = OTHER; note = 2'-O-Methyl-cytidine
  modified_base 92: mod_base = OTHER; note = 2'-O-Methyl-guanosine
  modified_base 93: mod_base = OTHER; note = 2'-O-Methyl-guanosine
  modified_base 94: mod_base = OTHER; note = 2'-O-Methyl-uridine
  modified_base 95: mod_base = OTHER; note = 2'-O-Methyl-guanosine
  modified_base 96: mod_base = OTHER; note = 2'-O-Methyl-cytidine
  modified_base 97: mod_base = OTHER; note = 2'-O-Methyl-uridine
  modified_base 98: mod_base = OTHER; note = 2'-O-Methyl-uridine phosphorothioate
  modified_base 99: mod_base = OTHER; note = 2'-O-Methyl-uridine phosphorothioate
  modified_base 100: mod_base = OTHER; note = 2'-O-Methyl-uridine
  misc_difference 101: note = a, c, g, inosine, u, deoxyadenosine, deoxyguanosine, deoxycytidine, deoxyinosine, thymine, ribonebularine, 2'-O-methylnebularine, or 2'-deoxynebularine
  misc_difference 102: note = a, c, g, inosine, u, deoxyadenosine, deoxyguanosine, deoxycytidine, deoxyinosine, thymine, ribonebularine, 2'-O-methylnebularine, or 2'-deoxynebularine
  misc_difference 103: note = a, c, g, inosine, u, deoxyadenosine, deoxyguanosine, deoxycytidine, deoxyinosine, thymine, ribonebularine, 2'-O-methylnebularine, or 2'-deoxynebularine

SEQ ID NO: 2962 - RNA, 103 nt, synthetic construct; identical to SEQ ID NO: 1796
  source 1..103: mol_type = other RNA
  modified_base 1: mod_base = OTHER; note = 2'-O-Methyl-guanosine phosphorothioate
  modified_base 2: mod_base = OTHER; note = 2'-O-Methyl-adenosine phosphorothioate
  modified_base 3: mod_base = OTHER; note = 2'-O-Methyl-guanosine phosphorothioate
  modified_base 21: mod_base = OTHER; note = 2'-O-Methyl-guanosine
  modified_base 28: mod_base = OTHER; note = 2'-O-Methyl-adenosine
  modified_base 29: mod_base = OTHER; note = 2'-O-Methyl-guanosine
  modified_base 30: mod_base = OTHER; note = 2'-O-Methyl-cytidine
  modified_base 31: mod_base = OTHER; note = 2'-O-Methyl-uridine
  modified_base 32: mod_base = OTHER; note = 2'-O-Methyl-adenosine
  modified_base 34: mod_base = OTHER; note = 2'-O-Methyl-adenosine
  modified_base 35: mod_base = OTHER; note = 2'-O-Methyl-adenosine
  modified_base 36: mod_base = OTHER; note = 2'-O-Methyl-adenosine
  modified_base 37: mod_base = OTHER; note = 2'-O-Methyl-uridine
  modified_base 38: mod_base = OTHER; note = 2'-O-Methyl-adenosine
  modified_base 39: mod_base = OTHER; note = 2'-O-Methyl-guanosine
  modified_base 40: mod_base = OTHER; note = 2'-O-Methyl-cytidine
  modified_base 41: mod_base = OTHER; note = 2'-O-Methyl-adenosine
  modified_base 42: mod_base = OTHER; note = 2'-O-Methyl-adenosine
  modified_base 45: mod_base = OTHER; note = uridine phosphorothioate
  modified_base 46: mod_base = OTHER; note = 2'-O-Methyl-adenosine
  modified_base 48: mod_base = OTHER; note = 2'-O-Methyl-adenosine
  modified_base 50: mod_base = OTHER; note = 2'-O-Methyl-uridine
  modified_base 52: mod_base = OTHER; note = 2'-O-Methyl-adenosine
  modified_base 53: mod_base = OTHER; note = 2'-O-Methyl-guanosine
  modified_base 54: mod_base = OTHER; note = 2'-O-Methyl-guanosine
  modified_base 55: mod_base = OTHER; note = 2'-O-Methyl-cytidine
  modified_base 56: mod_base = OTHER; note = 2'-O-Methyl-uridine
  modified_base 57: mod_base = OTHER; note = 2'-O-Methyl-adenosine
  modified_base 60: mod_base = OTHER; note = 2'-O-Methyl-cytidine
  modified_base 61: mod_base = OTHER; note = 2'-O-Methyl-cytidine
  modified_base 66: mod_base = OTHER; note = 2'-O-Methyl-uridine
  modified_base 67: mod_base = OTHER; note = 2'-O-Methyl-cytidine
  modified_base 70: mod_base = OTHER; note = 2'-O-Methyl-cytidine
  modified_base 71: mod_base = OTHER; note = 2'-O-Methyl-uridine
  modified_base 72: mod_base = OTHER; note = 2'-O-Methyl-uridine
  modified_base 74: mod_base = OTHER; note = 2'-O-Methyl-adenosine
  modified_base 75: mod_base = OTHER; note = 2'-O-Methyl-adenosine
  modified_base 76: mod_base = OTHER; note = 2'-O-Methyl-adenosine
  modified_base 77: mod_base = OTHER; note = 2'-O-Methyl-adenosine
  modified_base 78: mod_base = OTHER; note = 2'-O-Methyl-adenosine
  modified_base 79: mod_base = OTHER; note = 2'-O-Methyl-guanosine
  modified_base 80: mod_base = OTHER; note = 2'-O-Methyl-uridine
  modified_base 81: mod_base = OTHER; note = 2'-O-Methyl-guanosine
  modified_base 83: mod_base = OTHER; note = 2'-O-Methyl-cytidine
  modified_base 84: mod_base = OTHER; note = 2'-O-Methyl-adenosine
  modified_base 85: mod_base = OTHER; note = 2'-O-Methyl-cytidine
  modified_base 86: mod_base = OTHER; note = 2'-O-Methyl-cytidine
  modified_base 87: mod_base = OTHER; note = 2'-O-Methyl-guanosine
  modified_base 88: mod_base = OTHER; note = 2'-O-Methyl-adenosine
  modified_base 89: mod_base = OTHER; note = 2'-O-Methyl-guanosine
  modified_base 90: mod_base = OTHER; note = 2'-O-Methyl-uridine
  modified_base 91: mod_base = OTHER; note = 2'-O-Methyl-cytidine
  modified_base 92: mod_base = OTHER; note = 2'-O-Methyl-guanosine
  modified_base 93: mod_base = OTHER; note = 2'-O-Methyl-guanosine
  modified_base 94: mod_base = OTHER; note = 2'-O-Methyl-uridine
  modified_base 95: mod_base = OTHER; note = 2'-O-Methyl-guanosine
  modified_base 96: mod_base = OTHER; note = 2'-O-Methyl-cytidine
  modified_base 97: mod_base = OTHER; note = 2'-O-Methyl-uridine
  modified_base 98: mod_base = OTHER; note = 2'-O-Methyl-uridine phosphorothioate
  modified_base 99: mod_base = OTHER; note = 2'-O-Methyl-uridine phosphorothioate
  modified_base 100: mod_base = OTHER; note = 2'-O-Methyl-uridine
  misc_difference 101: note = a, c, g, inosine, u, deoxyadenosine, deoxyguanosine, deoxycytidine, deoxyinosine, thymine, ribonebularine, 2'-O-methylnebularine, or 2'-deoxynebularine
  misc_difference 102: note = a, c, g, inosine, u, deoxyadenosine, deoxyguanosine, deoxycytidine, deoxyinosine, thymine, ribonebularine, 2'-O-methylnebularine, or 2'-deoxynebularine
  misc_difference 103: note = a, c, g, inosine, u, deoxyadenosine, deoxyguanosine, deoxycytidine, deoxyinosine, thymine, ribonebularine, 2'-O-methylnebularine, or 2'-deoxynebularine

SEQ ID NO: 2963 - RNA, 103 nt, synthetic construct; identical to SEQ ID NO: 1797
  source 1..103: mol_type = other RNA
  modified_base 1: mod_base = OTHER; note = 2'-O-Methyl-cytidine phosphorothioate
  modified_base 2: mod_base = OTHER; note = 2'-O-Methyl-adenosine phosphorothioate
  modified_base 3: mod_base = OTHER; note = 2'-O-Methyl-guanosine phosphorothioate
  modified_base 21: mod_base = OTHER; note = 2'-O-Methyl-guanosine
  modified_base 28: mod_base = OTHER; note = 2'-O-Methyl-adenosine
  modified_base 29: mod_base = OTHER; note = 2'-O-Methyl-guanosine
  modified_base 30: mod_base = OTHER; note = 2'-O-Methyl-cytidine
  modified_base 31: mod_base = OTHER; note = 2'-O-Methyl-uridine
  modified_base 32: mod_base = OTHER; note = 2'-O-Methyl-adenosine
  modified_base 33: mod_base = OTHER; note = 2'-O-Methyl-guanosine
  modified_base 34: mod_base = OTHER; note = 2'-O-Methyl-adenosine
  modified_base 35: mod_base = OTHER; note = 2'-O-Methyl-adenosine
  modified_base 36: mod_base = OTHER; note = 2'-O-Methyl-adenosine
  modified_base 37: mod_base = OTHER; note = 2'-O-Methyl-uridine
  modified_base 38: mod_base = OTHER; note = 2'-O-Methyl-adenosine
  modified_base 39: mod_base = OTHER; note = 2'-O-Methyl-guanosine
  modified_base 40: mod_base = OTHER; note = 2'-O-Methyl-cytidine
  modified_base 41: mod_base = OTHER; note = 2'-O-Methyl-adenosine
  modified_base 42: mod_base = OTHER; note = 2'-O-Methyl-adenosine
  modified_base 45: mod_base = OTHER; note = uridine phosphorothioate
  modified_base 46: mod_base = OTHER; note = 2'-O-Methyl-adenosine
  modified_base 48: mod_base = OTHER; note = 2'-O-Methyl-adenosine
  modified_base 50: mod_base = OTHER; note = 2'-O-Methyl-uridine
  modified_base 52: mod_base = OTHER; note = 2'-O-Methyl-adenosine
  modified_base 53: mod_base = OTHER; note = 2'-O-Methyl-guanosine
  modified_base 54: mod_base = OTHER; note = 2'-O-Methyl-guanosine
  modified_base 57: mod_base = OTHER; note = 2'-O-Methyl-adenosine
  modified_base 61: mod_base = OTHER; note = 2'-O-Methyl-cytidine
  modified_base 66: mod_base = OTHER; note = 2'-O-Methyl-uridine
  modified_base 67: mod_base = OTHER; note = 2'-O-Methyl-cytidine
  modified_base 70: mod_base = OTHER; note = 2'-O-Methyl-cytidine
  modified_base 71: mod_base = OTHER; note = 2'-O-Methyl-uridine
  modified_base 72: mod_base = OTHER; note = 2'-O-Methyl-uridine
  modified_base 74: mod_base = OTHER; note = 2'-O-Methyl-adenosine
  modified_base 75: mod_base = OTHER; note = 2'-O-Methyl-adenosine
  modified_base 76: mod_base = OTHER; note = 2'-O-Methyl-adenosine
  modified_base 77: mod_base = OTHER; note = 2'-O-Methyl-adenosine
  modified_base 78: mod_base = OTHER; note = 2'-O-Methyl-adenosine
  modified_base 79: mod_base = OTHER; note = 2'-O-Methyl-guanosine
  modified_base 80: mod_base = OTHER; note = 2'-O-Methyl-uridine
  modified_base 82: mod_base = OTHER; note = 2'-O-Methyl-guanosine
  modified_base 83: mod_base = OTHER; note = 2'-O-Methyl-cytidine
  modified_base 84: mod_base = OTHER; note = 2'-O-Methyl-adenosine
  modified_base 85: mod_base = OTHER; note = 2'-O-Methyl-cytidine
  modified_base 86: mod_base = OTHER; note = 2'-O-Methyl-cytidine
  modified_base 87: mod_base = OTHER; note = 2'-O-Methyl-guanosine
  modified_base 89: mod_base = OTHER; note = 2'-O-Methyl-guanosine
  modified_base 92: mod_base = OTHER; note = 2'-O-Methyl-guanosine
  modified_base 93: mod_base = OTHER; note = 2'-O-Methyl-guanosine
  modified_base 94: mod_base = OTHER; note = 2'-O-Methyl-uridine
  modified_base 95: mod_base = OTHER; note = 2'-O-Methyl-guanosine
  modified_base 96: mod_base = OTHER; note = 2'-O-Methyl-cytidine
  modified_base 97: mod_base = OTHER; note = 2'-O-Methyl-uridine
  modified_base 98: mod_base = OTHER; note = 2'-O-Methyl-uridine phosphorothioate
  modified_base 99: mod_base = OTHER; note = 2'-O-Methyl-uridine phosphorothioate
  modified_base 100: mod_base = OTHER; note = 2'-O-Methyl-uridine
  misc_difference 101: note = a, c, g, inosine, u, deoxyadenosine, deoxyguanosine, deoxycytidine, deoxyinosine, thymine, ribonebularine, 2'-O-methylnebularine, or 2'-deoxynebularine
  misc_difference 102: note = a, c, g, inosine, u, deoxyadenosine, deoxyguanosine, deoxycytidine, deoxyinosine, thymine, ribonebularine, 2'-O-methylnebularine, or 2'-deoxynebularine
  misc_difference 103: note = a, c, g, inosine, u, deoxyadenosine, deoxyguanosine, deoxycytidine, deoxyinosine, thymine, ribonebularine, 2'-O-methylnebularine, or 2'-deoxynebularine

SEQ ID NO: 2964 - RNA, 103 nt, synthetic construct; identical to SEQ ID NO: 1797
  source 1..103: mol_type = other RNA
  modified_base 1: mod_base = OTHER; note = 2'-O-Methyl-cytidine phosphorothioate
  modified_base 2: mod_base = OTHER; note = 2'-O-Methyl-adenosine phosphorothioate
  modified_base 3: mod_base = OTHER; note = 2'-O-Methyl-guanosine phosphorothioate
  modified_base 21: mod_base = OTHER; note = 2'-O-Methyl-guanosine
  modified_base 28: mod_base = OTHER; note = 2'-O-Methyl-adenosine
  modified_base 29: mod_base = OTHER; note = 2'-O-Methyl-guanosine
  modified_base 30: mod_base = OTHER; note = 2'-O-Methyl-cytidine
  modified_base 31: mod_base = OTHER; note = 2'-O-Methyl-uridine
  modified_base 32: mod_base = OTHER; note = 2'-O-Methyl-adenosine
  modified_base 33: mod_base = OTHER; note = 2'-O-Methyl-guanosine
  modified_base 34: mod_base = OTHER; note = 2'-O-Methyl-adenosine
  modified_base 35: mod_base = OTHER; note = 2'-O-Methyl-adenosine
  modified_base 36: mod_base = OTHER; note = 2'-O-Methyl-adenosine
  modified_base 37: mod_base = OTHER; note = 2'-O-Methyl-uridine
  modified_base 38: mod_base = OTHER; note = 2'-O-Methyl-adenosine
  modified_base 39: mod_base = OTHER; note = 2'-O-Methyl-guanosine
  modified_base 40: mod_base = OTHER; note = 2'-O-Methyl-cytidine
  modified_base 41: mod_base = OTHER; note = 2'-O-Methyl-adenosine
  modified_base 42: mod_base = OTHER; note = 2'-O-Methyl-adenosine
  modified_base 45: mod_base = OTHER; note = uridine phosphorothioate
  modified_base 46: mod_base = OTHER; note = 2'-O-Methyl-adenosine
  modified_base 48: mod_base = OTHER; note = 2'-O-Methyl-adenosine
  modified_base 50: mod_base = OTHER; note = 2'-O-Methyl-uridine
  modified_base 52: mod_base = OTHER; note = 2'-O-Methyl-adenosine
  modified_base 53: mod_base = OTHER; note = 2'-O-Methyl-guanosine
  modified_base 54: mod_base = OTHER; note = 2'-O-Methyl-guanosine
  modified_base 55: mod_base = OTHER; note = 2'-O-Methyl-cytidine
  modified_base 56: mod_base = OTHER; note = 2'-O-Methyl-uridine
  modified_base 57: mod_base = OTHER; note = 2'-O-Methyl-adenosine
  modified_base 60: mod_base = OTHER; note = 2'-O-Methyl-cytidine
  modified_base 61: mod_base = OTHER; note = 2'-O-Methyl-cytidine
  modified_base 66: mod_base = OTHER; note = 2'-O-Methyl-uridine
  modified_base 67: mod_base = OTHER; note = 2'-O-Methyl-cytidine
  modified_base 70: mod_base = OTHER; note = 2'-O-Methyl-cytidine
  modified_base 71: mod_base = OTHER; note = 2'-O-Methyl-uridine
  modified_base 72: mod_base = OTHER; note = 2'-O-Methyl-uridine
  modified_base 74: mod_base = OTHER; note = 2'-O-Methyl-adenosine
  modified_base 75: mod_base = OTHER; note = 2'-O-Methyl-adenosine
  modified_base 76: mod_base = OTHER; note = 2'-O-Methyl-adenosine
  modified_base 77: mod_base = OTHER; note = 2'-O-Methyl-adenosine
  modified_base 78: mod_base = OTHER; note = 2'-O-Methyl-adenosine
  modified_base 79: mod_base = OTHER; note = 2'-O-Methyl-guanosine
  modified_base 80: mod_base = OTHER; note = 2'-O-Methyl-uridine
  modified_base 82: mod_base = OTHER; note = 2'-O-Methyl-guanosine
  modified_base 83: mod_base = OTHER; note = 2'-O-Methyl-cytidine
  modified_base 84: mod_base = OTHER; note = 2'-O-Methyl-adenosine
  modified_base 85: mod_base = OTHER; note = 2'-O-Methyl-cytidine
  modified_base 86: mod_base = OTHER; note = 2'-O-Methyl-cytidine
  modified_base 87: mod_base = OTHER; note = 2'-O-Methyl-guanosine
  modified_base 89: mod_base = OTHER; note = 2'-O-Methyl-guanosine
  modified_base 92: mod_base = OTHER; note = 2'-O-Methyl-guanosine
  modified_base 93: mod_base = OTHER; note = 2'-O-Methyl-guanosine
  modified_base 94: mod_base = OTHER; note = 2'-O-Methyl-uridine
  modified_base 95: mod_base = OTHER; note = 2'-O-Methyl-guanosine
  modified_base 96: mod_base = OTHER; note = 2'-O-Methyl-cytidine
  modified_base 97: mod_base = OTHER; note = 2'-O-Methyl-uridine
  modified_base 98: mod_base = OTHER; note = 2'-O-Methyl-uridine phosphorothioate
  modified_base 99: mod_base = OTHER; note = 2'-O-Methyl-uridine phosphorothioate
  modified_base 100: mod_base = OTHER; note = 2'-O-Methyl-uridine
  misc_difference 101: note = a, c, g, inosine, u, deoxyadenosine, deoxyguanosine, deoxycytidine, deoxyinosine, thymine, ribonebularine, 2'-O-methylnebularine, or 2'-deoxynebularine
  misc_difference 102: note = a, c, g, inosine, u, deoxyadenosine, deoxyguanosine, deoxycytidine, deoxyinosine, thymine, ribonebularine, 2'-O-methylnebularine, or 2'-deoxynebularine
  misc_difference 103: note = a, c, g, inosine, u, deoxyadenosine, deoxyguanosine, deoxycytidine, deoxyinosine, thymine, ribonebularine, 2'-O-methylnebularine, or 2'-deoxynebularine

SEQ ID NO: 2965 - RNA, 103 nt, synthetic construct; identical to SEQ ID NO: 1797
  source 1..103: mol_type = other RNA
  modified_base 1: mod_base = OTHER; note = 2'-O-Methyl-cytidine phosphorothioate
  modified_base 2: mod_base = OTHER; note = 2'-O-Methyl-adenosine phosphorothioate
  modified_base 3: mod_base = OTHER; note = 2'-O-Methyl-guanosine phosphorothioate
  modified_base 21: mod_base = OTHER; note = 2'-O-Methyl-guanosine
  modified_base 28: mod_base = OTHER; note = 2'-O-Methyl-adenosine
  modified_base 29: mod_base = OTHER; note = 2'-O-Methyl-guanosine
  modified_base 30: mod_base = OTHER; note = 2'-O-Methyl-cytidine
  modified_base 31: mod_base = OTHER; note = 2'-O-Methyl-uridine
  modified_base 32: mod_base = OTHER; note = 2'-O-Methyl-adenosine
  modified_base 33: mod_base = OTHER; note = 2'-O-Methyl-guanosine
  modified_base 34: mod_base = OTHER; note = 2'-O-Methyl-adenosine
  modified_base 35: mod_base = OTHER; note = 2'-O-Methyl-adenosine
  modified_base 36: mod_base = OTHER; note = 2'-O-Methyl-adenosine
  modified_base 37: mod_base = OTHER; note = 2'-O-Methyl-uridine
  modified_base 38: mod_base = OTHER; note = 2'-O-Methyl-adenosine
  modified_base 39: mod_base = OTHER; note = 2'-O-Methyl-guanosine
  modified_base 40: mod_base = OTHER; note = 2'-O-Methyl-cytidine
  modified_base 41: mod_base = OTHER; note = 2'-O-Methyl-adenosine
  modified_base 42: mod_base = OTHER; note = 2'-O-Methyl-adenosine
  modified_base 45: mod_base = OTHER; note = uridine phosphorothioate
  modified_base 46: mod_base = OTHER; note = 2'-O-Methyl-adenosine
  modified_base 48: mod_base = OTHER; note = 2'-O-Methyl-adenosine
  modified_base 50: mod_base = OTHER; note = 2'-O-Methyl-uridine
  modified_base 52: mod_base = OTHER; note = 2'-O-Methyl-adenosine
  modified_base 53: mod_base = OTHER; note = 2'-O-Methyl-guanosine
  modified_base 54: mod_base = OTHER; note = 2'-O-Methyl-guanosine
  modified_base 57: mod_base = OTHER; note = 2'-O-Methyl-adenosine
  modified_base 61: mod_base = OTHER; note = 2'-O-Methyl-cytidine
  modified_base 66: mod_base = OTHER; note = 2'-O-Methyl-uridine
  modified_base 67: mod_base = OTHER; note = 2'-O-Methyl-cytidine
  modified_base 70: mod_base = OTHER; note = 2'-O-Methyl-cytidine
  modified_base 71: mod_base = OTHER; note = 2'-O-Methyl-uridine
  modified_base 72: mod_base = OTHER; note = 2'-O-Methyl-uridine
  modified_base 73: mod_base = OTHER; note = 2'-O-Methyl-guanosine
  modified_base 74: mod_base = OTHER; note = 2'-O-Methyl-adenosine
  modified_base 75: mod_base = OTHER; note = 2'-O-Methyl-adenosine
  modified_base 76: mod_base = OTHER; note = 2'-O-Methyl-adenosine
  modified_base 77: mod_base = OTHER; note = 2'-O-Methyl-adenosine
  modified_base 78: mod_base = OTHER; note = 2'-O-Methyl-adenosine
  modified_base 79: mod_base = OTHER; note = 2'-O-Methyl-guanosine
  modified_base 80: mod_base = OTHER; note = 2'-O-Methyl-uridine
  modified_base 82: mod_base = OTHER; note = 2'-O-Methyl-guanosine
  modified_base 83: mod_base = OTHER; note = 2'-O-Methyl-cytidine
  modified_base 84: mod_base = OTHER; note = 2'-O-Methyl-adenosine
  modified_base 85: mod_base = OTHER; note = 2'-O-Methyl-cytidine
  modified_base 86: mod_base = OTHER; note = 2'-O-Methyl-cytidine
  modified_base 87: mod_base = OTHER; note = 2'-O-Methyl-guanosine
  modified_base 89: mod_base = OTHER; note = 2'-O-Methyl-guanosine
  modified_base 91: mod_base = OTHER; note = 2'-O-Methyl-cytidine
  modified_base 92: mod_base = OTHER; note = 2'-O-Methyl-guanosine
  modified_base 93: mod_base = OTHER; note = 2'-O-Methyl-guanosine
  modified_base 94: mod_base = OTHER; note = 2'-O-Methyl-uridine
  modified_base 95: mod_base = OTHER; note = 2'-O-Methyl-guanosine
  modified_base 96: mod_base = OTHER; note = 2'-O-Methyl-cytidine
  modified_base 97: mod_base = OTHER; note = 2'-O-Methyl-uridine
  modified_base 98: mod_base = OTHER; note = 2'-O-Methyl-uridine phosphorothioate
  modified_base 99: mod_base = OTHER; note = 2'-O-Methyl-uridine phosphorothioate
  modified_base 100: mod_base = OTHER; note = 2'-O-Methyl-uridine
  misc_difference 101: note = a, c, g, inosine, u, deoxyadenosine, deoxyguanosine, deoxycytidine, deoxyinosine, thymine, ribonebularine, 2'-O-methylnebularine, or 2'-deoxynebularine
  misc_difference 102: note = a, c, g, inosine, u, deoxyadenosine, deoxyguanosine, deoxycytidine, deoxyinosine, thymine, ribonebularine, 2'-O-methylnebularine, or 2'-deoxynebularine
  misc_difference 103: note = a, c, g, inosine, u, deoxyadenosine, deoxyguanosine, deoxycytidine, deoxyinosine, thymine, ribonebularine, 2'-O-methylnebularine, or 2'-deoxynebularine

SEQ ID NO: 2966 - RNA, 103 nt, synthetic construct; identical to SEQ ID NO: 1797
  source 1..103: mol_type = other RNA
  modified_base 1: mod_base = OTHER; note = 2'-O-Methyl-cytidine phosphorothioate
  modified_base 2: mod_base = OTHER; note = 2'-O-Methyl-adenosine phosphorothioate
  modified_base 3: mod_base = OTHER; note = 2'-O-Methyl-guanosine phosphorothioate
  modified_base 21: mod_base = OTHER; note = 2'-O-Methyl-guanosine
  modified_base 28: mod_base = OTHER; note = 2'-O-Methyl-adenosine
  modified_base 29: mod_base = OTHER; note = 2'-O-Methyl-guanosine
  modified_base 30: mod_base = OTHER; note = 2'-O-Methyl-cytidine
  modified_base 31: mod_base = OTHER; note = 2'-O-Methyl-uridine
  modified_base 32: mod_base = OTHER; note = 2'-O-Methyl-adenosine
  modified_base 34: mod_base = OTHER; note = 2'-O-Methyl-adenosine
  modified_base 35: mod_base = OTHER; note = 2'-O-Methyl-adenosine
  modified_base 36: mod_base = OTHER; note = 2'-O-Methyl-adenosine
  modified_base 37: mod_base = OTHER; note = 2'-O-Methyl-uridine
  modified_base 38: mod_base = OTHER; note = 2'-O-Methyl-adenosine
  modified_base 39: mod_base = OTHER; note = 2'-O-Methyl-guanosine
  modified_base 40: mod_base = OTHER; note = 2'-O-Methyl-cytidine
  modified_base 41: mod_base = OTHER; note = 2'-O-Methyl-adenosine
  modified_base 42: mod_base = OTHER; note = 2'-O-Methyl-adenosine
  modified_base 45: mod_base = OTHER; note = uridine phosphorothioate
  modified_base 46: mod_base = OTHER; note = 2'-O-Methyl-adenosine
  modified_base 48: mod_base = OTHER; note = 2'-O-Methyl-adenosine
  modified_base 50: mod_base = OTHER; note = 2'-O-Methyl-uridine
  modified_base 52: mod_base = OTHER; note = 2'-O-Methyl-adenosine
  modified_base 53: mod_base = OTHER; note = 2'-O-Methyl-guanosine
  modified_base 54: mod_base = OTHER; note = 2'-O-Methyl-guanosine
  modified_base 57: mod_base = OTHER; note = 2'-O-Methyl-adenosine
  modified_base 61: mod_base = OTHER; note = 2'-O-Methyl-cytidine
  modified_base 66: mod_base = OTHER; note = 2'-O-Methyl-uridine
  modified_base 67: mod_base = OTHER; note = 2'-O-Methyl-cytidine
  modified_base 70: mod_base = OTHER; note = 2'-O-Methyl-cytidine
  modified_base 71: mod_base = OTHER; note = 2'-O-Methyl-uridine
  modified_base 72: mod_base = OTHER; note = 2'-O-Methyl-uridine
  modified_base 73: mod_base = OTHER; note = 2'-O-Methyl-guanosine
  modified_base 74: mod_base = OTHER; note = 2'-O-Methyl-adenosine
  modified_base 75: mod_base = OTHER; note = 2'-O-Methyl-adenosine
  modified_base 76: mod_base = OTHER; note = 2'-O-Methyl-adenosine
  modified_base 77: mod_base = OTHER; note = 2'-O-Methyl-adenosine
  modified_base 78: mod_base = OTHER; note = 2'-O-Methyl-adenosine
  modified_base 79: mod_base = OTHER; note = 2'-O-Methyl-guanosine
  modified_base 80: mod_base = OTHER; note = 2'-O-Methyl-uridine
  modified_base 82: mod_base = OTHER; note = 2'-O-Methyl-guanosine
  modified_base 83: mod_base = OTHER; note = 2'-O-Methyl-cytidine
  modified_base 84: mod_base = OTHER; note = 2'-O-Methyl-adenosine
  modified_base 85: mod_base = OTHER; note = 2'-O-Methyl-cytidine
  modified_base 86: mod_base = OTHER; note = 2'-O-Methyl-cytidine
  modified_base 87: mod_base = OTHER; note = 2'-O-Methyl-guanosine
  modified_base 89: mod_base = OTHER; note = 2'-O-Methyl-guanosine
  modified_base 92: mod_base = OTHER; note = 2'-O-Methyl-guanosine
  modified_base 93: mod_base = OTHER; note = 2'-O-Methyl-guanosine
  modified_base 94: mod_base = OTHER; note = 2'-O-Methyl-uridine
  modified_base 95: mod_base = OTHER; note = 2'-O-Methyl-guanosine
  modified_base 96: mod_base = OTHER; note = 2'-O-Methyl-cytidine
  modified_base 97: mod_base = OTHER; note = 2'-O-Methyl-uridine
  modified_base 98: mod_base = OTHER; note = 2'-O-Methyl-uridine phosphorothioate
  modified_base 99: mod_base = OTHER; note = 2'-O-Methyl-uridine phosphorothioate
  modified_base 100: mod_base = OTHER; note = 2'-O-Methyl-uridine
  misc_difference 101: note = a, c, g, inosine, u, deoxyadenosine, deoxyguanosine, deoxycytidine, deoxyinosine, thymine, ribonebularine, 2'-O-methylnebularine, or 2'-deoxynebularine
  misc_difference 102: note = a, c, g, inosine, u, deoxyadenosine, deoxyguanosine, deoxycytidine, deoxyinosine, thymine, ribonebularine, 2'-O-methylnebularine, or 2'-deoxynebularine
  misc_difference 103: note = a, c, g, inosine, u, deoxyadenosine, deoxyguanosine, deoxycytidine, deoxyinosine, thymine, ribonebularine, 2'-O-methylnebularine, or 2'-deoxynebularine

SEQ ID NO: 2967 - RNA, 103 nt, synthetic construct; identical to SEQ ID NO: 1797
  source 1..103: mol_type = other RNA
  modified_base 1: mod_base = OTHER; note = 2'-O-Methyl-cytidine phosphorothioate
  modified_base 2: mod_base = OTHER; note = 2'-O-Methyl-adenosine phosphorothioate
  modified_base 3: mod_base = OTHER; note = 2'-O-Methyl-guanosine phosphorothioate
  modified_base 21: mod_base = OTHER; note = 2'-O-Methyl-guanosine
  modified_base 28: mod_base = OTHER; note = 2'-O-Methyl-adenosine
  modified_base 29: mod_base = OTHER; note = 2'-O-Methyl-guanosine
  modified_base 30: mod_base = OTHER; note = 2'-O-Methyl-cytidine
  modified_base 31: mod_base = OTHER; note = 2'-O-Methyl-uridine
  modified_base 32: mod_base = OTHER; note = 2'-O-Methyl-adenosine
  modified_base 34: mod_base = OTHER; note = 2'-O-Methyl-adenosine
  modified_base 35: mod_base = OTHER; note = 2'-O-Methyl-adenosine
  modified_base 36: mod_base = OTHER; note = 2'-O-Methyl-adenosine
  modified_base 37: mod_base = OTHER; note = 2'-O-Methyl-uridine
  modified_base 38: mod_base = OTHER; note = 2'-O-Methyl-adenosine
  modified_base 39: mod_base = OTHER; note = 2'-O-Methyl-guanosine
  modified_base 40: mod_base = OTHER; note = 2'-O-Methyl-cytidine
  modified_base 41: mod_base = OTHER; note = 2'-O-Methyl-adenosine
  modified_base 42: mod_base = OTHER; note = 2'-O-Methyl-adenosine
  modified_base 45: mod_base = OTHER; note = uridine phosphorothioate
  modified_base 46: mod_base = OTHER; note = 2'-O-Methyl-adenosine
  modified_base 48: mod_base = OTHER; note = 2'-O-Methyl-adenosine
  modified_base 50: mod_base = OTHER; note = 2'-O-Methyl-uridine
  modified_base 52: mod_base = OTHER; note = 2'-O-Methyl-adenosine
  modified_base 53: mod_base = OTHER; note = 2'-O-Methyl-guanosine
  modified_base 54: mod_base = OTHER; note = 2'-O-Methyl-guanosine
  modified_base 57: mod_base = OTHER; note = 2'-O-Methyl-adenosine
  modified_base 61: mod_base = OTHER; note = 2'-O-Methyl-cytidine
  modified_base 66: mod_base = OTHER; note = 2'-O-Methyl-uridine
  modified_base 67: mod_base = OTHER; note = 2'-O-Methyl-cytidine
  modified_base 70: mod_base = OTHER; note = 2'-O-Methyl-cytidine
  modified_base 71: mod_base = OTHER; note = 2'-O-Methyl-uridine
  modified_base 72: mod_base = OTHER; note = 2'-O-Methyl-uridine
  modified_base 73: mod_base = OTHER; note = 2'-O-Methyl-guanosine
  modified_base 74: mod_base = OTHER; note = 2'-O-Methyl-adenosine
  modified_base 75: mod_base = OTHER; note = 2'-O-Methyl-adenosine
  modified_base 76: mod_base = OTHER; note = 2'-O-Methyl-adenosine
  modified_base 77: mod_base = OTHER; note = 2'-O-Methyl-adenosine
  modified_base 78: mod_base = OTHER; note = 2'-O-Methyl-adenosine
  modified_base 79: mod_base = OTHER; note = 2'-O-Methyl-guanosine
  modified_base 80: mod_base = OTHER; note = 2'-O-Methyl-uridine
  modified_base 82: mod_base = OTHER; note = 2'-O-Methyl-guanosine
  modified_base 83: mod_base = OTHER; note = 2'-O-Methyl-cytidine
  modified_base 84: mod_base = OTHER; note = 2'-O-Methyl-adenosine
  modified_base 85: mod_base = OTHER; note = 2'-O-Methyl-cytidine
  modified_base 86: mod_base = OTHER; note = 2'-O-Methyl-cytidine
  modified_base 87: mod_base = OTHER; note = 2'-O-Methyl-guanosine
  modified_base 89: mod_base = OTHER; note = 2'-O-Methyl-guanosine
  modified_base 91: mod_base = OTHER; note = 2'-O-Methyl-cytidine
  modified_base 92: mod_base = OTHER; note = 2'-O-Methyl-guanosine
  modified_base 93: mod_base = OTHER; note = 2'-O-Methyl-guanosine
  modified_base 94: mod_base = OTHER; note = 2'-O-Methyl-uridine
  modified_base 95: mod_base = OTHER; note = 2'-O-Methyl-guanosine
  modified_base 96: mod_base = OTHER; note = 2'-O-Methyl-cytidine
  modified_base 97: mod_base = OTHER; note = 2'-O-Methyl-uridine
  modified_base 98: mod_base = OTHER; note = 2'-O-Methyl-uridine phosphorothioate
  modified_base 99: mod_base = OTHER; note = 2'-O-Methyl-uridine phosphorothioate
  modified_base 100: mod_base = OTHER; note = 2'-O-Methyl-uridine
  misc_difference 101: note = a, c, g, inosine, u, deoxyadenosine, deoxyguanosine, deoxycytidine, deoxyinosine, thymine, ribonebularine, 2'-O-methylnebularine, or 2'-deoxynebularine
  misc_difference 102: note = a, c, g, inosine, u, deoxyadenosine, deoxyguanosine, deoxycytidine, deoxyinosine, thymine, ribonebularine, 2'-O-methylnebularine, or 2'-deoxynebularine
  misc_difference 103: note = a, c, g, inosine, u, deoxyadenosine, deoxyguanosine, deoxycytidine, deoxyinosine, thymine, ribonebularine, 2'-O-methylnebularine, or 2'-deoxynebularine

SEQ ID NO: 2968 - RNA, 103 nt, synthetic construct; identical to SEQ ID NO: 1797
  source 1..103: mol_type = other RNA
  modified_base 1: mod_base = OTHER; note = 2'-O-Methyl-cytidine phosphorothioate
  modified_base 2: mod_base = OTHER; note = 2'-O-Methyl-adenosine phosphorothioate
  modified_base 3: mod_base = OTHER; note = 2'-O-Methyl-guanosine phosphorothioate
  modified_base 21: mod_base = OTHER; note = 2'-O-Methyl-guanosine
  modified_base 28: mod_base = OTHER; note = 2'-O-Methyl-adenosine
  modified_base 29: mod_base = OTHER; note = 2'-O-Methyl-guanosine
  modified_base 30: mod_base = OTHER; note = 2'-O-Methyl-cytidine
  modified_base 31: mod_base = OTHER; note = 2'-O-Methyl-uridine
  modified_base 32: mod_base = OTHER; note = 2'-O-Methyl-adenosine
  modified_base 34: mod_base = OTHER; note = 2'-O-Methyl-adenosine
  modified_base 35: mod_base = OTHER; note = 2'-O-Methyl-adenosine
  modified_base 36: mod_base = OTHER; note = 2'-O-Methyl-adenosine
  modified_base 37: mod_base = OTHER; note = 2'-O-Methyl-uridine
  modified_base 38: mod_base = OTHER; note = 2'-O-Methyl-adenosine
  modified_base 39: mod_base = OTHER; note = 2'-O-Methyl-guanosine
  modified_base 40: mod_base = OTHER; note = 2'-O-Methyl-cytidine
  modified_base 41: mod_base = OTHER; note = 2'-O-Methyl-adenosine
  modified_base 42: mod_base = OTHER; note = 2'-O-Methyl-adenosine
  modified_base 45: mod_base = OTHER; note = uridine phosphorothioate
  modified_base 46: mod_base = OTHER; note = 2'-O-Methyl-adenosine
  modified_base 48: mod_base = OTHER; note = 2'-O-Methyl-adenosine
  modified_base 50: mod_base = OTHER; note = 2'-O-Methyl-uridine
  modified_base 52: mod_base = OTHER; note = 2'-O-Methyl-adenosine
  modified_base 53: mod_base = OTHER; note = 2'-O-Methyl-guanosine
  modified_base 54: mod_base = OTHER; note = 2'-O-Methyl-guanosine
  modified_base 55: mod_base = OTHER; note = 2'-O-Methyl-cytidine
  modified_base 56: mod_base = OTHER; note = 2'-O-Methyl-uridine
  modified_base 57: mod_base = OTHER; note = 2'-O-Methyl-adenosine
  modified_base 60: mod_base = OTHER; note = 2'-O-Methyl-cytidine
  modified_base 61: mod_base = OTHER; note = 2'-O-Methyl-cytidine
  modified_base 66: mod_base = OTHER; note = 2'-O-Methyl-uridine
  modified_base 67: mod_base = OTHER; note = 2'-O-Methyl-cytidine
  modified_base 70: mod_base = OTHER; note = 2'-O-Methyl-cytidine
  modified_base 71: mod_base = OTHER; note = 2'-O-Methyl-uridine
  modified_base 72: mod_base = OTHER; note = 2'-O-Methyl-uridine
  modified_base 74: mod_base = OTHER; note = 2'-O-Methyl-adenosine
  modified_base 75: mod_base = OTHER; note = 2'-O-Methyl-adenosine
  modified_base 76: mod_base = OTHER; note = 2'-O-Methyl-adenosine
  modified_base 77: mod_base = OTHER; note = 2'-O-Methyl-adenosine
  modified_base 78: mod_base = OTHER; note = 2'-O-Methyl-adenosine
  modified_base 79: mod_base = OTHER; note = 2'-O-Methyl-guanosine
  modified_base 80: mod_base = OTHER; note = 2'-O-Methyl-uridine
  modified_base 82: mod_base = OTHER; note = 2'-O-Methyl-guanosine
  modified_base 83: mod_base = OTHER; note = 2'-O-Methyl-cytidine
  modified_base 84: mod_base = OTHER; note = 2'-O-Methyl-adenosine
  modified_base 85: mod_base = OTHER; note = 2'-O-Methyl-cytidine
  modified_base 86: mod_base = OTHER; note = 2'-O-Methyl-cytidine
  modified_base 87: mod_base = OTHER; note = 2'-O-Methyl-guanosine
  modified_base 89: mod_base = OTHER; note = 2'-O-Methyl-guanosine
  modified_base 92: mod_base = OTHER; note = 2'-O-Methyl-guanosine
  modified_base 93: mod_base = OTHER; note = 2'-O-Methyl-guanosine
  modified_base 94: mod_base = OTHER; note = 2'-O-Methyl-uridine
  modified_base 95: mod_base = OTHER; note = 2'-O-Methyl-guanosine
  modified_base 96: mod_base = OTHER; note = 2'-O-Methyl-cytidine
  modified_base 97: mod_base = OTHER; note = 2'-O-Methyl-uridine
  modified_base 98: mod_base = OTHER; note = 2'-O-Methyl-uridine phosphorothioate
  modified_base 99: mod_base = OTHER; note = 2'-O-Methyl-uridine phosphorothioate
  modified_base 100: mod_base = OTHER; note = 2'-O-Methyl-uridine
  misc_difference 101: note = a, c, g, inosine, u, deoxyadenosine, deoxyguanosine, deoxycytidine, deoxyinosine, thymine, ribonebularine, 2'-O-methylnebularine, or 2'-deoxynebularine
  misc_difference 102: note = a, c, g, inosine, u, deoxyadenosine, deoxyguanosine, deoxycytidine, deoxyinosine, thymine, ribonebularine, 2'-O-methylnebularine, or 2'-deoxynebularine
  misc_difference 103: note = a, c, g, inosine, u, deoxyadenosine, deoxyguanosine, deoxycytidine, deoxyinosine, thymine, ribonebularine, 2'-O-methylnebularine, or 2'-deoxynebularine

SEQ ID NO: 2969 - RNA, 103 nt, synthetic construct; identical to SEQ ID NO: 1795
  source 1..103: mol_type = other RNA
  modified_base 1: mod_base = OTHER; note = 2'-O-Methyl-cytidine phosphorothioate
  modified_base 2: mod_base = OTHER; note = 2'-O-Methyl-cytidine phosphorothioate
  modified_base 3: mod_base = OTHER; note = 2'-O-Methyl-cytidine phosphorothioate
  modified_base 21: mod_base = OTHER; note = 2'-O-Methyl-guanosine
  modified_base 25: mod_base = OTHER; note = uridine phosphorothioate
  modified_base 28: mod_base = OTHER; note = 2'-O-Methyl-adenosine
  modified_base 29: mod_base = OTHER; note = 2'-O-Methyl-guanosine
  modified_base 30: mod_base = OTHER; note = 2'-O-Methyl-cytidine
  modified_base 31: mod_base = OTHER; note = 2'-O-Methyl-uridine
  modified_base 32: mod_base = OTHER; note = 2'-O-Methyl-adenosine
  modified_base 33: mod_base = OTHER; note = 2'-O-Methyl-guanosine
  modified_base 34: mod_base = OTHER; note = 2'-O-Methyl-adenosine
  modified_base 35: mod_base = OTHER; note = 2'-O-Methyl-adenosine
  modified_base 36: mod_base = OTHER; note = 2'-O-Methyl-adenosine
  modified_base 37: mod_base = OTHER; note = 2'-O-Methyl-uridine
  modified_base 38: mod_base = OTHER; note = 2'-O-Methyl-adenosine
  modified_base 39: mod_base = OTHER; note = 2'-O-Methyl-guanosine
  modified_base 40: mod_base = OTHER; note = 2'-O-Methyl-cytidine
  modified_base 41: mod_base = OTHER; note = 2'-O-Methyl-adenosine
  modified_base 42: mod_base = OTHER; note = 2'-O-Methyl-adenosine
  modified_base 46: mod_base = OTHER; note = 2'-O-Methyl-adenosine
  modified_base 48: mod_base = OTHER; note = 2'-O-Methyl-adenosine
  modified_base 50: mod_base = OTHER; note = 2'-O-Methyl-uridine
  modified_base 52: mod_base = OTHER; note = 2'-O-Methyl-adenosine
  modified_base 53: mod_base = OTHER; note = 2'-O-Methyl-guanosine
  modified_base 54: mod_base = OTHER; note = 2'-O-Methyl-guanosine
  modified_base 55: mod_base = OTHER; note = 2'-O-Methyl-cytidine
  modified_base 56: mod_base = OTHER; note = 2'-O-Methyl-uridine
  modified_base 57: mod_base = OTHER; note = 2'-O-Methyl-adenosine
  modified_base 60: mod_base = OTHER; note = 2'-O-Methyl-cytidine
  modified_base 61: mod_base = OTHER; note = 2'-O-Methyl-cytidine
  modified_base 66: mod_base = OTHER; note = 2'-O-Methyl-uridine
  modified_base 67: mod_base = OTHER; note = 2'-O-Methyl-cytidine
  modified_base 70: mod_base = OTHER; note = 2'-O-Methyl-cytidine
  modified_base 71: mod_base = OTHER; note = 2'-O-Methyl-uridine
  modified_base 72: mod_base = OTHER; note = 2'-O-Methyl-uridine
  modified_base 73: mod_base = OTHER; note = 2'-O-Methyl-guanosine
  modified_base 74: mod_base = OTHER; note = 2'-O-Methyl-adenosine
  modified_base 75: mod_base = OTHER; note = 2'-O-Methyl-adenosine
  modified_base 76: mod_base = OTHER; note = 2'-O-Methyl-adenosine
  modified_base 77: mod_base = OTHER; note = 2'-O-Methyl-adenosine
  modified_base 78: mod_base = OTHER; note = 2'-O-Methyl-adenosine
  modified_base 79: mod_base = OTHER; note = 2'-O-Methyl-guanosine
  modified_base 80: mod_base = OTHER; note = 2'-O-Methyl-uridine
  modified_base 81: mod_base = OTHER; note = 2'-O-Methyl-guanosine
  modified_base 83: mod_base = OTHER; note = 2'-O-Methyl-cytidine
  modified_base 84: mod_base = OTHER; note = 2'-O-Methyl-adenosine
  modified_base 85: mod_base = OTHER; note = 2'-O-Methyl-cytidine
  modified_base 86: mod_base = OTHER; note = 2'-O-Methyl-cytidine
  modified_base 87: mod_base = OTHER; note = 2'-O-Methyl-guanosine
  modified_base 88: mod_base = OTHER; note = 2'-O-Methyl-adenosine
  modified_base 89: mod_base = OTHER; note = 2'-O-Methyl-guanosine
  modified_base 90: mod_base = OTHER; note = 2'-O-Methyl-uridine
  modified_base 91: mod_base = OTHER; note = 2'-O-Methyl-cytidine
  modified_base 92: mod_base = OTHER; note = 2'-O-Methyl-guanosine
  modified_base 93: mod_base = OTHER; note = 2'-O-Methyl-guanosine
  modified_base 94: mod_base = OTHER; note = 2'-O-Methyl-uridine
  modified_base 95: mod_base = OTHER; note = 2'-O-Methyl-guanosine
  modified_base 96: mod_base = OTHER; note = 2'-O-Methyl-cytidine
  modified_base 97: mod_base = OTHER; note = 2'-O-Methyl-uridine
  modified_base 98: mod_base = OTHER; note = 2'-O-Methyl-uridine phosphorothioate
  modified_base 99: mod_base = OTHER; note = 2'-O-Methyl-uridine phosphorothioate
  modified_base 100: mod_base = OTHER; note = 2'-O-Methyl-uridine
  misc_difference 101: note = a, c, g, inosine, u, deoxyadenosine, deoxyguanosine, deoxycytidine, deoxyinosine, thymine, ribonebularine, 2'-O-methylnebularine, or 2'-deoxynebularine
  misc_difference 102: note = a, c, g, inosine, u, deoxyadenosine, deoxyguanosine, deoxycytidine, deoxyinosine, thymine, ribonebularine, 2'-O-methylnebularine, or 2'-deoxynebularine
  misc_difference 103: note = a, c, g, inosine, u, deoxyadenosine, deoxyguanosine, deoxycytidine, deoxyinosine, thymine, ribonebularine, 2'-O-methylnebularine, or 2'-deoxynebularine

SEQ ID NO: 2970 - RNA, 103 nt, synthetic construct; identical to SEQ ID NO: 1795
  source 1..103: mol_type = other RNA
  modified_base 1: mod_base = OTHER; note = 2'-O-Methyl-cytidine phosphorothioate
  modified_base 2: mod_base = OTHER; note = 2'-O-Methyl-cytidine phosphorothioate
  modified_base 3: mod_base = OTHER; note = 2'-O-Methyl-cytidine phosphorothioate
  modified_base 21: mod_base = OTHER; note = 2'-O-Methyl-guanosine
  modified_base 25: mod_base = OTHER; note = uridine phosphorothioate
  modified_base 28: mod_base = OTHER; note = 2'-O-Methyl-adenosine
  modified_base 29: mod_base = OTHER; note = 2'-O-Methyl-guanosine
  modified_base 30: mod_base = OTHER; note = 2'-O-Methyl-cytidine
  modified_base 31: mod_base = OTHER; note = 2'-O-Methyl-uridine
  modified_base 32: mod_base = OTHER; note = 2'-O-Methyl-adenosine
  modified_base 34: mod_base = OTHER; note = 2'-O-Methyl-adenosine
  modified_base 35: mod_base = OTHER; note = 2'-O-Methyl-adenosine
  modified_base 36: mod_base = OTHER; note = 2'-O-Methyl-adenosine
  modified_base 37: mod_base = OTHER; note = 2'-O-Methyl-uridine
  modified_base 38: mod_base = OTHER; note = 2'-O-Methyl-adenosine
  modified_base 39: mod_base = OTHER; note = 2'-O-Methyl-guanosine
  modified_base 40: mod_base = OTHER; note = 2'-O-Methyl-cytidine
  modified_base 41: mod_base = OTHER; note = 2'-O-Methyl-adenosine
  modified_base 42: mod_base = OTHER; note = 2'-O-Methyl-adenosine
  modified_base 46: mod_base = OTHER; note = 2'-O-Methyl-adenosine
  modified_base 48: mod_base = OTHER; note = 2'-O-Methyl-adenosine
  modified_base 50: mod_base = OTHER; note = 2'-O-Methyl-uridine
  modified_base 52: mod_base = OTHER; note = 2'-O-Methyl-adenosine
  modified_base 53: mod_base = OTHER; note = 2'-O-Methyl-guanosine
  modified_base 54: mod_base = OTHER; note = 2'-O-Methyl-guanosine
  modified_base 55: mod_base = OTHER; note = 2'-O-Methyl-cytidine
  modified_base 56: mod_base = OTHER; note = 2'-O-Methyl-uridine
  modified_base 57: mod_base = OTHER; note = 2'-O-Methyl-adenosine
  modified_base 60: mod_base = OTHER; note = 2'-O-Methyl-cytidine
  modified_base 61: mod_base = OTHER; note = 2'-O-Methyl-cytidine
  modified_base 66: mod_base = OTHER; note = 2'-O-Methyl-uridine
  modified_base 67: mod_base = OTHER; note = 2'-O-Methyl-cytidine
  modified_base 70: mod_base = OTHER; note = 2'-O-Methyl-cytidine
  modified_base 71: mod_base = OTHER; note = 2'-O-Methyl-uridine
  modified_base 72: mod_base = OTHER; note = 2'-O-Methyl-uridine
  modified_base 74: mod_base = OTHER; note = 2'-O-Methyl-adenosine
  modified_base 75: mod_base = OTHER; note = 2'-O-Methyl-adenosine
  modified_base 76: mod_base = OTHER; note = 2'-O-Methyl-adenosine
  modified_base 77: mod_base = OTHER; note = 2'-O-Methyl-adenosine
  modified_base 78: mod_base = OTHER; note = 2'-O-Methyl-adenosine
  modified_base 79: mod_base = OTHER; note = 2'-O-Methyl-guanosine
  modified_base 80: mod_base = OTHER; note = 2'-O-Methyl-uridine
  modified_base 81: mod_base = OTHER; note = 2'-O-Methyl-guanosine
  modified_base 83: mod_base = OTHER; note = 2'-O-Methyl-cytidine
  modified_base 84: mod_base = OTHER; note = 2'-O-Methyl-adenosine
  modified_base 85: mod_base = OTHER; note = 2'-O-Methyl-cytidine
  modified_base 86: mod_base = OTHER; note = 2'-O-Methyl-cytidine
  modified_base 87: mod_base = OTHER; note = 2'-O-Methyl-guanosine
  modified_base 88: mod_base = OTHER; note = 2'-O-Methyl-adenosine
  modified_base 89: mod_base = OTHER; note = 2'-O-Methyl-guanosine
  modified_base 90: mod_base = OTHER; note = 2'-O-Methyl-uridine
  modified_base 91: mod_base = OTHER; note = 2'-O-Methyl-cytidine
  modified_base 92: mod_base = OTHER; note = 2'-O-Methyl-guanosine
  modified_base 93: mod_base = OTHER; note = 2'-O-Methyl-guanosine
  modified_base 94: mod_base = OTHER; note = 2'-O-Methyl-uridine
  modified_base 95: mod_base = OTHER; note = 2'-O-Methyl-guanosine
  modified_base 96: mod_base = OTHER; note = 2'-O-Methyl-cytidine
  modified_base 97: mod_base = OTHER; note = 2'-O-Methyl-uridine
  modified_base 98: mod_base = OTHER; note = 2'-O-Methyl-uridine phosphorothioate
  modified_base 99: mod_base = OTHER; note = 2'-O-Methyl-uridine phosphorothioate
  modified_base 100: mod_base = OTHER; note = 2'-O-Methyl-uridine
  misc_difference 101: note = a, c, g, inosine, u, deoxyadenosine, deoxyguanosine, deoxycytidine, deoxyinosine, thymine, ribonebularine, 2'-O-methylnebularine, or 2'-deoxynebularine
  misc_difference 102: note = a, c, g, inosine, u, deoxyadenosine, deoxyguanosine, deoxycytidine, deoxyinosine, thymine, ribonebularine, 2'-O-methylnebularine, or 2'-deoxynebularine
  misc_difference 103: note = a, c, g, inosine, u, deoxyadenosine, deoxyguanosine, deoxycytidine, deoxyinosine, thymine, ribonebularine, 2'-O-methylnebularine, or 2'-deoxynebularine

SEQ ID NO: 2971 - RNA, 103 nt, synthetic construct; identical to SEQ ID NO: 1796
  source 1..103: mol_type = other RNA
  modified_base 1: mod_base = OTHER; note = 2'-O-Methyl-guanosine phosphorothioate
  modified_base 2: mod_base = OTHER; note = 2'-O-Methyl-adenosine phosphorothioate
  modified_base 3: mod_base = OTHER; note = 2'-O-Methyl-guanosine phosphorothioate
  modified_base 21: mod_base = OTHER; note = 2'-O-Methyl-guanosine
  modified_base 25: mod_base = OTHER; note = uridine phosphorothioate
  modified_base 28: mod_base = OTHER; note = 2'-O-Methyl-adenosine
  modified_base 29: mod_base = OTHER; note = 2'-O-Methyl-guanosine
  modified_base 30: mod_base = OTHER; note = 2'-O-Methyl-cytidine
  modified_base 31: mod_base = OTHER; note = 2'-O-Methyl-uridine
  modified_base 32: mod_base = OTHER; note = 2'-O-Methyl-adenosine
  modified_base 33: mod_base = OTHER; note = 2'-O-Methyl-guanosine
  modified_base 34: mod_base = OTHER; note = 2'-O-Methyl-adenosine
  modified_base 35: mod_base = OTHER; note = 2'-O-Methyl-adenosine
  modified_base 36: mod_base = OTHER; note = 2'-O-Methyl-adenosine
  modified_base 37: mod_base = OTHER; note = 2'-O-Methyl-uridine
  modified_base 38: mod_base = OTHER; note = 2'-O-Methyl-adenosine
  modified_base 39: mod_base = OTHER; note = 2'-O-Methyl-guanosine
  modified_base 40: mod_base = OTHER; note = 2'-O-Methyl-cytidine
  modified_base 41: mod_base = OTHER; note = 2'-O-Methyl-adenosine
  modified_base 42: mod_base = OTHER; note = 2'-O-Methyl-adenosine
  modified_base 46: mod_base = OTHER; note = 2'-O-Methyl-adenosine
  modified_base 48: mod_base = OTHER; note = 2'-O-Methyl-adenosine
  modified_base 50: mod_base = OTHER; note = 2'-O-Methyl-uridine
  modified_base 52: mod_base = OTHER; note = 2'-O-Methyl-adenosine
  modified_base 53: mod_base = OTHER; note = 2'-O-Methyl-guanosine
  modified_base 54: mod_base = OTHER; note = 2'-O-Methyl-guanosine
  modified_base 55: mod_base = OTHER; note = 2'-O-Methyl-cytidine
  modified_base 56: mod_base = OTHER; note = 2'-O-Methyl-uridine
  modified_base 57: mod_base = OTHER; note = 2'-O-Methyl-adenosine
  modified_base 60: mod_base = OTHER; note = 2'-O-Methyl-cytidine
  modified_base 61: mod_base = OTHER; note = 2'-O-Methyl-cytidine
  modified_base 66: mod_base = OTHER; note = 2'-O-Methyl-uridine
  modified_base 67: mod_base = OTHER; note = 2'-O-Methyl-cytidine
  modified_base 70: mod_base = OTHER; note = 2'-O-Methyl-cytidine
  modified_base 71: mod_base = OTHER; note = 2'-O-Methyl-uridine
  modified_base 72: mod_base = OTHER; note = 2'-O-Methyl-uridine
  modified_base 73: mod_base = OTHER; note = 2'-O-Methyl-guanosine
  modified_base 74: mod_base = OTHER; note = 2'-O-Methyl-adenosine
  modified_base 75: mod_base = OTHER; note = 2'-O-Methyl-adenosine
  modified_base 76: mod_base = OTHER; note = 2'-O-Methyl-adenosine
  modified_base 77: mod_base = OTHER; note = 2'-O-Methyl-adenosine
  modified_base 78: mod_base = OTHER; note = 2'-O-Methyl-adenosine
  modified_base 79: mod_base = OTHER; note = 2'-O-Methyl-guanosine
  modified_base 80: mod_base = OTHER; note = 2'-O-Methyl-uridine
  modified_base 81: mod_base = OTHER; note = 2'-O-Methyl-guanosine
  modified_base 83: mod_base = OTHER; note = 2'-O-Methyl-cytidine
  modified_base 84: mod_base = OTHER; note = 2'-O-Methyl-adenosine
  modified_base 85: mod_base = OTHER; note = 2'-O-Methyl-cytidine
  modified_base 86: mod_base = OTHER; note = 2'-O-Methyl-cytidine
  modified_base 87: mod_base = OTHER; note = 2'-O-Methyl-guanosine
  modified_base 88: mod_base = OTHER; note = 2'-O-Methyl-adenosine
  modified_base 89: mod_base = OTHER; note = 2'-O-Methyl-guanosine
  modified_base 90: mod_base = OTHER; note = 2'-O-Methyl-uridine
  modified_base 91: mod_base = OTHER; note = 2'-O-Methyl-cytidine
  modified_base 92: mod_base = OTHER; note = 2'-O-Methyl-guanosine
  modified_base 93: mod_base = OTHER; note = 2'-O-Methyl-guanosine
  modified_base 94: mod_base = OTHER; note = 2'-O-Methyl-uridine
  modified_base 95: mod_base = OTHER; note = 2'-O-Methyl-guanosine
  modified_base 96: mod_base = OTHER; note = 2'-O-Methyl-cytidine
  modified_base 97: mod_base = OTHER; note = 2'-O-Methyl-uridine
  modified_base 98: mod_base = OTHER; note = 2'-O-Methyl-uridine phosphorothioate
  modified_base 99: mod_base = OTHER; note = 2'-O-Methyl-uridine phosphorothioate
  modified_base 100: mod_base = OTHER; note = 2'-O-Methyl-uridine
  misc_difference 101: note = a, c, g, inosine, u, deoxyadenosine, deoxyguanosine, deoxycytidine, deoxyinosine, thymine, ribonebularine, 2'-O-methylnebularine, or 2'-deoxynebularine
  misc_difference 102: note = a, c, g, inosine, u, deoxyadenosine, deoxyguanosine, deoxycytidine, deoxyinosine, thymine, ribonebularine, 2'-O-methylnebularine, or 2'-deoxynebularine
  misc_difference 103: note = a, c, g, inosine, u, deoxyadenosine, deoxyguanosine, deoxycytidine, deoxyinosine, thymine, ribonebularine, 2'-O-methylnebularine, or 2'-deoxynebularine

SEQ ID NO: 2972 - RNA, 103 nt, synthetic construct; identical to SEQ ID NO: 1796
  source 1..103: mol_type = other RNA
  modified_base 1: mod_base = OTHER; note = 2'-O-Methyl-guanosine phosphorothioate
  modified_base 2: mod_base = OTHER; note = 2'-O-Methyl-adenosine phosphorothioate
  modified_base 3: mod_base = OTHER; note = 2'-O-Methyl-guanosine phosphorothioate
  modified_base 21: mod_base = OTHER; note = 2'-O-Methyl-guanosine
  modified_base 25: mod_base = OTHER; note = uridine phosphorothioate
  modified_base 28: mod_base = OTHER; note = 2'-O-Methyl-adenosine
  modified_base 29: mod_base = OTHER; note = 2'-O-Methyl-guanosine
  modified_base 30: mod_base = OTHER; note = 2'-O-Methyl-cytidine
  modified_base 31: mod_base = OTHER; note = 2'-O-Methyl-uridine
  modified_base 32: mod_base = OTHER; note = 2'-O-Methyl-adenosine
  modified_base 34: mod_base = OTHER; note = 2'-O-Methyl-adenosine
  modified_base 35: mod_base = OTHER; note = 2'-O-Methyl-adenosine
  modified_base 36: mod_base = OTHER; note = 2'-O-Methyl-adenosine
  modified_base 37: mod_base = OTHER; note = 2'-O-Methyl-uridine
  modified_base 38: mod_base = OTHER; note = 2'-O-Methyl-adenosine
  modified_base 39: mod_base = OTHER; note = 2'-O-Methyl-guanosine
  modified_base 40: mod_base = OTHER; note = 2'-O-Methyl-cytidine
  modified_base 41: mod_base = OTHER; note = 2'-O-Methyl-adenosine
  modified_base 42: mod_base = OTHER; note = 2'-O-Methyl-adenosine
  modified_base 46: mod_base = OTHER; note = 2'-O-Methyl-adenosine
  modified_base 48: mod_base = OTHER; note = 2'-O-Methyl-adenosine
  modified_base 50: mod_base = OTHER; note = 2'-O-Methyl-uridine
  modified_base 52: mod_base = OTHER; note = 2'-O-Methyl-adenosine
  modified_base 53: mod_base = OTHER; note = 2'-O-Methyl-guanosine
  modified_base 54: mod_base = OTHER; note = 2'-O-Methyl-guanosine
  modified_base 55: mod_base = OTHER; note = 2'-O-Methyl-cytidine
  modified_base 56: mod_base = OTHER; note = 2'-O-Methyl-uridine
  modified_base 57: mod_base = OTHER; note = 2'-O-Methyl-adenosine
  modified_base 60: mod_base = OTHER; note = 2'-O-Methyl-cytidine
  modified_base 61: mod_base = OTHER; note = 2'-O-Methyl-cytidine
  modified_base 66: mod_base = OTHER; note = 2'-O-Methyl-uridine
  modified_base 67: mod_base = OTHER; note = 2'-O-Methyl-cytidine
  modified_base 70: mod_base = OTHER; note = 2'-O-Methyl-cytidine
  modified_base 71: mod_base = OTHER; note = 2'-O-Methyl-uridine
  modified_base 72: mod_base = OTHER; note = 2'-O-Methyl-uridine
  modified_base 74: mod_base = OTHER; note = 2'-O-Methyl-adenosine
  modified_base 75: mod_base = OTHER; note = 2'-O-Methyl-adenosine
  modified_base 76: mod_base = OTHER; note = 2'-O-Methyl-adenosine
  modified_base 77: mod_base = OTHER; note = 2'-O-Methyl-adenosine
  modified_base 78: mod_base = OTHER; note = 2'-O-Methyl-adenosine
  modified_base 79: mod_base = OTHER; note = 2'-O-Methyl-guanosine
  modified_base 80: mod_base = OTHER; note = 2'-O-Methyl-uridine
  modified_base 81: mod_base = OTHER; note = 2'-O-Methyl-guanosine
  modified_base 83: mod_base = OTHER; note = 2'-O-Methyl-cytidine
  modified_base 84: mod_base = OTHER; note = 2'-O-Methyl-adenosine
  modified_base 85: mod_base = OTHER; note = 2'-O-Methyl-cytidine
  modified_base 86: mod_base = OTHER; note = 2'-O-Methyl-cytidine
  modified_base 87: mod_base = OTHER; note = 2'-O-Methyl-guanosine
  modified_base 88: mod_base = OTHER; note = 2'-O-Methyl-adenosine
  modified_base 89: mod_base = OTHER; note = 2'-O-Methyl-guanosine
  modified_base 90: mod_base = OTHER; note = 2'-O-Methyl-uridine
  modified_base 91: mod_base = OTHER; note = 2'-O-Methyl-cytidine
  modified_base 92: mod_base = OTHER; note = 2'-O-Methyl-guanosine
  modified_base 93: mod_base = OTHER; note = 2'-O-Methyl-guanosine
  modified_base 94: mod_base = OTHER; note = 2'-O-Methyl-uridine
  modified_base 95: mod_base = OTHER; note = 2'-O-Methyl-guanosine
  modified_base 96: mod_base = OTHER; note = 2'-O-Methyl-cytidine
  modified_base 97: mod_base = OTHER; note = 2'-O-Methyl-uridine
  modified_base 98: mod_base = OTHER; note = 2'-O-Methyl-uridine phosphorothioate
  modified_base 99: mod_base = OTHER; note = 2'-O-Methyl-uridine phosphorothioate
  modified_base 100: mod_base = OTHER; note = 2'-O-Methyl-uridine
  misc_difference 101: note = a, c, g, inosine, u, deoxyadenosine, deoxyguanosine, deoxycytidine, deoxyinosine, thymine, ribonebularine, 2'-O-methylnebularine, or 2'-deoxynebularine
  misc_difference 102: note = a, c, g, inosine, u, deoxyadenosine, deoxyguanosine, deoxycytidine, deoxyinosine, thymine, ribonebularine, 2'-O-methylnebularine, or 2'-deoxynebularine
  misc_difference 103: note = a, c, g, inosine, u, deoxyadenosine, deoxyguanosine, deoxycytidine, deoxyinosine, thymine, ribonebularine, 2'-O-methylnebularine, or 2'-deoxynebularine

SEQ ID NO: 2973 - RNA, 103 nt, synthetic construct; identical to SEQ ID NO: 1797
  source 1..103: mol_type = other RNA
  modified_base 1: mod_base = OTHER; note = 2'-O-Methyl-cytidine phosphorothioate
  modified_base 2: mod_base = OTHER; note = 2'-O-Methyl-adenosine phosphorothioate
  modified_base 3: mod_base = OTHER; note = 2'-O-Methyl-guanosine phosphorothioate
  modified_base 21: mod_base = OTHER; note = 2'-O-Methyl-guanosine
  modified_base 25: mod_base = OTHER; note = uridine phosphorothioate
  modified_base 28: mod_base = OTHER; note = 2'-O-Methyl-adenosine
  modified_base 29: mod_base = OTHER; note = 2'-O-Methyl-guanosine
  modified_base 30: mod_base = OTHER; note = 2'-O-Methyl-cytidine
  modified_base 31: mod_base = OTHER; note = 2'-O-Methyl-uridine
  modified_base 32: mod_base = OTHER; note = 2'-O-Methyl-adenosine
  modified_base 33: mod_base = OTHER; note = 2'-O-Methyl-guanosine
  modified_base 34: mod_base = OTHER; note = 2'-O-Methyl-adenosine
  modified_base 35: mod_base = OTHER; note = 2'-O-Methyl-adenosine
  modified_base 36: mod_base = OTHER; note = 2'-O-Methyl-adenosine
  modified_base 37: mod_base = OTHER; note = 2'-O-Methyl-uridine
  modified_base 38: mod_base = OTHER; note = 2'-O-Methyl-adenosine
  modified_base 39: mod_base = OTHER; note = 2'-O-Methyl-guanosine
  modified_base 40: mod_base = OTHER; note = 2'-O-Methyl-cytidine
  modified_base 41: mod_base = OTHER; note = 2'-O-Methyl-adenosine
  modified_base 42: mod_base = OTHER; note = 2'-O-Methyl-adenosine
  modified_base 46: mod_base = OTHER; note = 2'-O-Methyl-adenosine
  modified_base 48: mod_base = OTHER; note = 2'-O-Methyl-adenosine
  modified_base 50: mod_base = OTHER; note = 2'-O-Methyl-uridine
  modified_base 52: mod_base = OTHER; note = 2'-O-Methyl-adenosine
  modified_base 53: mod_base = OTHER; note = 2'-O-Methyl-guanosine
  modified_base 54: mod_base = OTHER; note = 2'-O-Methyl-guanosine
  modified_base 57: mod_base = OTHER; note = 2'-O-Methyl-adenosine
  modified_base 61: mod_base = OTHER; note = 2'-O-Methyl-cytidine
  modified_base 66: mod_base = OTHER; note = 2'-O-Methyl-uridine
  modified_base 67: mod_base = OTHER; note = 2'-O-Methyl-cytidine
  modified_base 70: mod_base = OTHER; note = 2'-O-Methyl-cytidine
  modified_base 71: mod_base = OTHER; note = 2'-O-Methyl-uridine
  modified_base 72: mod_base = OTHER; note = 2'-O-Methyl-uridine
  modified_base 74: mod_base = OTHER; note = 2'-O-Methyl-adenosine
  modified_base 75: mod_base = OTHER; note = 2'-O-Methyl-adenosine
  modified_base 76: mod_base = OTHER; note = 2'-O-Methyl-adenosine
  modified_base 77: mod_base = OTHER; note = 2'-O-Methyl-adenosine
  modified_base 78: mod_base = OTHER; note = 2'-O-Methyl-adenosine
  modified_base 79: mod_base = OTHER; note = 2'-O-Methyl-guanosine
  modified_base 80: mod_base = OTHER; note = 2'-O-Methyl-uridine
  modified_base 82: mod_base = OTHER; note = 2'-O-Methyl-guanosine
  modified_base 83: mod_base = OTHER; note = 2'-O-Methyl-cytidine
  modified_base 84: mod_base = OTHER; note = 2'-O-Methyl-adenosine
  modified_base 85: mod_base = OTHER; note = 2'-O-Methyl-cytidine
  modified_base 86: mod_base = OTHER; note = 2'-O-Methyl-cytidine
  modified_base 87: mod_base = OTHER; note = 2'-O-Methyl-guanosine
  modified_base 89: mod_base = OTHER; note = 2'-O-Methyl-guanosine
  modified_base 92: mod_base = OTHER; note = 2'-O-Methyl-guanosine
  modified_base 93: mod_base = OTHER; note = 2'-O-Methyl-guanosine
  modified_base 94: mod_base = OTHER; note = 2'-O-Methyl-uridine
  modified_base 95: mod_base = OTHER; note = 2'-O-Methyl-guanosine
  modified_base 96: mod_base = OTHER; note = 2'-O-Methyl-cytidine
  modified_base 97: mod_base = OTHER; note = 2'-O-Methyl-uridine
  modified_base 98: mod_base = OTHER; note = 2'-O-Methyl-uridine phosphorothioate
  modified_base 99: mod_base = OTHER; note = 2'-O-Methyl-uridine phosphorothioate
  modified_base 100: mod_base = OTHER; note = 2'-O-Methyl-uridine
  misc_difference 101: note = a, c, g, inosine, u, deoxyadenosine, deoxyguanosine, deoxycytidine, deoxyinosine, thymine, ribonebularine, 2'-O-methylnebularine, or 2'-deoxynebularine
  misc_difference 102: note = a, c, g, inosine, u, deoxyadenosine, deoxyguanosine, deoxycytidine, deoxyinosine, thymine, ribonebularine, 2'-O-methylnebularine, or 2'-deoxynebularine
  misc_difference 103: note = a, c, g, inosine, u, deoxyadenosine, deoxyguanosine, deoxycytidine, deoxyinosine, thymine, ribonebularine, 2'-O-methylnebularine, or 2'-deoxynebularine

SEQ ID NO: 2974 - RNA, 103 nt, synthetic construct; identical to SEQ ID NO: 1797
  source 1..103: mol_type = other RNA
  modified_base 1: mod_base = OTHER; note = 2'-O-Methyl-cytidine phosphorothioate
  modified_base 2: mod_base = OTHER; note = 2'-O-Methyl-adenosine phosphorothioate
  modified_base 3: mod_base = OTHER; note = 2'-O-Methyl-guanosine phosphorothioate
  modified_base 21: mod_base = OTHER; note = 2'-O-Methyl-guanosine
  modified_base 25: mod_base = OTHER; note = uridine phosphorothioate
  modified_base 28: mod_base = OTHER; note = 2'-O-Methyl-adenosine
  modified_base 29: mod_base = OTHER; note = 2'-O-Methyl-guanosine
  modified_base 30: mod_base = OTHER; note = 2'-O-Methyl-cytidine
  modified_base 31: mod_base = OTHER; note = 2'-O-Methyl-uridine
  modified_base 32: mod_base = OTHER; note = 2'-O-Methyl-adenosine
  modified_base 33: mod_base = OTHER; note = 2'-O-Methyl-guanosine
  modified_base 34: mod_base = OTHER; note = 2'-O-Methyl-adenosine
  modified_base 35: mod_base = OTHER; note = 2'-O-Methyl-adenosine
  modified_base 36: mod_base = OTHER; note = 2'-O-Methyl-adenosine
  modified_base 37: mod_base = OTHER; note = 2'-O-Methyl-uridine
  modified_base 38: mod_base = OTHER; note = 2'-O-Methyl-adenosine
  modified_base 39: mod_base = OTHER; note = 2'-O-Methyl-guanosine
  modified_base 40: mod_base = OTHER; note = 2'-O-Methyl-cytidine
  modified_base 41: mod_base = OTHER; note = 2'-O-Methyl-adenosine
  modified_base 42: mod_base = OTHER; note = 2'-O-Methyl-adenosine
  modified_base 46: mod_base = OTHER; note = 2'-O-Methyl-adenosine
  modified_base 48: mod_base = OTHER; note = 2'-O-Methyl-adenosine
  modified_base 50: mod_base = OTHER; note = 2'-O-Methyl-uridine
  modified_base 52: mod_base = OTHER; note = 2'-O-Methyl-adenosine
  modified_base 53: mod_base = OTHER; note = 2'-O-Methyl-guanosine
  modified_base 54: mod_base = OTHER; note = 2'-O-Methyl-guanosine
  modified_base 55: mod_base = OTHER; note = 2'-O-Methyl-cytidine
  modified_base 56: mod_base = OTHER; note = 2'-O-Methyl-uridine
  modified_base 57: mod_base = OTHER; note = 2'-O-Methyl-adenosine
  modified_base 60: mod_base = OTHER; note = 2'-O-Methyl-cytidine
  modified_base 61: mod_base = OTHER; note = 2'-O-Methyl-cytidine
  modified_base 66: mod_base = OTHER; note = 2'-O-Methyl-uridine
  modified_base 67: mod_base = OTHER; note = 2'-O-Methyl-cytidine
  modified_base 70: mod_base = OTHER; note = 2'-O-Methyl-cytidine
  modified_base 71: mod_base = OTHER; note = 2'-O-Methyl-uridine
  modified_base 72: mod_base = OTHER; note = 2'-O-Methyl-uridine
  modified_base 74: mod_base = OTHER; note = 2'-O-Methyl-adenosine
  modified_base 75: mod_base = OTHER; note = 2'-O-Methyl-adenosine
  modified_base 76: mod_base = OTHER; note = 2'-O-Methyl-adenosine
  modified_base 77: mod_base = OTHER; note = 2'-O-Methyl-adenosine
  modified_base 78: mod_base = OTHER; note = 2'-O-Methyl-adenosine
  modified_base 79: mod_base = OTHER; note = 2'-O-Methyl-guanosine
  modified_base 80: mod_base = OTHER; note = 2'-O-Methyl-uridine
  modified_base 82: mod_base = OTHER; note = 2'-O-Methyl-guanosine
  modified_base 83: mod_base = OTHER; note = 2'-O-Methyl-cytidine
  modified_base 84: mod_base = OTHER; note = 2'-O-Methyl-adenosine
  modified_base 85: mod_base = OTHER; note = 2'-O-Methyl-cytidine
  modified_base 86: mod_base = OTHER; note = 2'-O-Methyl-cytidine
  modified_base 87: mod_base = OTHER; note = 2'-O-Methyl-guanosine
  modified_base 89: mod_base = OTHER; note = 2'-O-Methyl-guanosine
  modified_base 92: mod_base = OTHER; note = 2'-O-Methyl-guanosine
  modified_base 93: mod_base = OTHER; note = 2'-O-Methyl-guanosine
  modified_base 94: mod_base = OTHER; note = 2'-O-Methyl-uridine
  modified_base 95: mod_base = OTHER; note = 2'-O-Methyl-guanosine
  modified_base 96: mod_base = OTHER; note = 2'-O-Methyl-cytidine
  modified_base 97: mod_base = OTHER; note = 2'-O-Methyl-uridine
  modified_base 98: mod_base = OTHER; note = 2'-O-Methyl-uridine phosphorothioate
  modified_base 99: mod_base = OTHER; note = 2'-O-Methyl-uridine phosphorothioate
  modified_base 100: mod_base = OTHER; note = 2'-O-Methyl-uridine
  misc_difference 101: note = a, c, g, inosine, u, deoxyadenosine, deoxyguanosine, deoxycytidine, deoxyinosine, thymine, ribonebularine, 2'-O-methylnebularine, or 2'-deoxynebularine
  misc_difference 102: note = a, c, g, inosine, u, deoxyadenosine, deoxyguanosine, deoxycytidine, deoxyinosine, thymine, ribonebularine, 2'-O-methylnebularine, or 2'-deoxynebularine
  misc_difference 103: note = a, c, g, inosine, u, deoxyadenosine, deoxyguanosine, deoxycytidine, deoxyinosine, thymine, ribonebularine, 2'-O-methylnebularine, or 2'-deoxynebularine

SEQ ID NO: 2975 - RNA, 103 nt, synthetic construct; identical to SEQ ID NO: 1797
  source 1..103: mol_type = other RNA
  modified_base 1: mod_base = OTHER; note = 2'-O-Methyl-cytidine phosphorothioate
  modified_base 2: mod_base = OTHER; note = 2'-O-Methyl-adenosine phosphorothioate
  modified_base 3: mod_base = OTHER; note = 2'-O-Methyl-guanosine phosphorothioate
  modified_base 21: mod_base = OTHER; note = 2'-O-Methyl-guanosine
  modified_base 25: mod_base = OTHER; note = uridine phosphorothioate
  modified_base 28: mod_base = OTHER; note = 2'-O-Methyl-adenosine
  modified_base 29: mod_base = OTHER; note = 2'-O-Methyl-guanosine
  modified_base 30: mod_base = OTHER; note = 2'-O-Methyl-cytidine
  modified_base 31: mod_base = OTHER; note = 2'-O-Methyl-uridine
  modified_base 32: mod_base = OTHER; note = 2'-O-Methyl-adenosine
  modified_base 33: mod_base = OTHER; note = 2'-O-Methyl-guanosine
  modified_base 34: mod_base = OTHER; note = 2'-O-Methyl-adenosine
  modified_base 35: mod_base = OTHER; note = 2'-O-Methyl-adenosine
  modified_base 36: mod_base = OTHER; note = 2'-O-Methyl-adenosine
  modified_base 37: mod_base = OTHER; note = 2'-O-Methyl-uridine
  modified_base 38: mod_base = OTHER; note = 2'-O-Methyl-adenosine
  modified_base 39: mod_base = OTHER; note = 2'-O-Methyl-guanosine
  modified_base 40: mod_base = OTHER; note = 2'-O-Methyl-cytidine
  modified_base 41: mod_base = OTHER; note = 2'-O-Methyl-adenosine
  modified_base 42: mod_base = OTHER; note = 2'-O-Methyl-adenosine
  modified_base 46: mod_base = OTHER; note = 2'-O-Methyl-adenosine
  modified_base 48: mod_base = OTHER; note = 2'-O-Methyl-adenosine
  modified_base 50: mod_base = OTHER; note = 2'-O-Methyl-uridine
  modified_base 52: mod_base = OTHER; note = 2'-O-Methyl-adenosine
  modified_base 53: mod_base = OTHER; note = 2'-O-Methyl-guanosine
  modified_base 54: mod_base = OTHER; note = 2'-O-Methyl-guanosine
  modified_base 57: mod_base = OTHER; note = 2'-O-Methyl-adenosine
  modified_base 61: mod_base = OTHER; note = 2'-O-Methyl-cytidine
  modified_base 66: mod_base = OTHER; note = 2'-O-Methyl-uridine
  modified_base 67: mod_base = OTHER; note = 2'-O-Methyl-cytidine
  modified_base 70: mod_base = OTHER; note = 2'-O-Methyl-cytidine
  modified_base 71: mod_base = OTHER; note = 2'-O-Methyl-uridine
  modified_base 72: mod_base = OTHER; note = 2'-O-Methyl-uridine
  modified_base 73: mod_base = OTHER; note = 2'-O-Methyl-guanosine
  modified_base 74: mod_base = OTHER; note = 2'-O-Methyl-adenosine
  modified_base 75: mod_base = OTHER; note = 2'-O-Methyl-adenosine
  modified_base 76: mod_base = OTHER; note = 2'-O-Methyl-adenosine
  modified_base 77: mod_base = OTHER; note = 2'-O-Methyl-adenosine
  modified_base 78: mod_base = OTHER; note = 2'-O-Methyl-adenosine
  modified_base 79: mod_base = OTHER; note = 2'-O-Methyl-guanosine
  modified_base 80: mod_base = OTHER; note = 2'-O-Methyl-uridine
  modified_base 82: mod_base = OTHER; note = 2'-O-Methyl-guanosine
  modified_base 83: mod_base = OTHER; note = 2'-O-Methyl-cytidine
  modified_base 84: mod_base = OTHER; note = 2'-O-Methyl-adenosine
  modified_base 85: mod_base = OTHER; note = 2'-O-Methyl-cytidine
  modified_base 86: mod_base = OTHER; note = 2'-O-Methyl-cytidine
  modified_base 87: mod_base = OTHER; note = 2'-O-Methyl-guanosine
  modified_base 89: mod_base = OTHER; note = 2'-O-Methyl-guanosine
  modified_base 92: mod_base = OTHER; note = 2'-O-Methyl-guanosine
  modified_base 93: mod_base = OTHER; note = 2'-O-Methyl-guanosine
  modified_base 94: mod_base = OTHER; note = 2'-O-Methyl-uridine
  modified_base 95: mod_base = OTHER; note = 2'-O-Methyl-guanosine
  modified_base 96: mod_base = OTHER; note = 2'-O-Methyl-cytidine
  modified_base 97: mod_base = OTHER; note = 2'-O-Methyl-uridine
  modified_base 98: mod_base = OTHER; note = 2'-O-Methyl-uridine phosphorothioate
  modified_base 99: mod_base = OTHER; note = 2'-O-Methyl-uridine phosphorothioate
  modified_base 100: mod_base = OTHER; note = 2'-O-Methyl-uridine
  misc_difference 101: note = a, c, g, inosine, u, deoxyadenosine, deoxyguanosine, deoxycytidine, deoxyinosine, thymine, ribonebularine, 2'-O-methylnebularine, or 2'-deoxynebularine
  misc_difference 102: note = a, c, g, inosine, u, deoxyadenosine, deoxyguanosine, deoxycytidine, deoxyinosine, thymine, ribonebularine, 2'-O-methylnebularine, or 2'-deoxynebularine
  misc_difference 103: note = a, c, g, inosine, u, deoxyadenosine, deoxyguanosine, deoxycytidine, deoxyinosine, thymine, ribonebularine, 2'-O-methylnebularine, or 2'-deoxynebularine

SEQ ID NO: 2976 - RNA, 103 nt, synthetic construct; identical to SEQ ID NO: 1797
  source 1..103: mol_type = other RNA
  modified_base 1: mod_base = OTHER; note = 2'-O-Methyl-cytidine phosphorothioate
  modified_base 2: mod_base = OTHER; note = 2'-O-Methyl-adenosine phosphorothioate
  modified_base 3: mod_base = OTHER; note = 2'-O-Methyl-guanosine phosphorothioate
  modified_base 21: mod_base = OTHER; note = 2'-O-Methyl-guanosine
  modified_base 25: mod_base = OTHER; note = uridine phosphorothioate
  modified_base 28: mod_base = OTHER; note = 2'-O-Methyl-adenosine
  modified_base 29: mod_base = OTHER; note = 2'-O-Methyl-guanosine
  modified_base 30: mod_base = OTHER; note = 2'-O-Methyl-cytidine
  modified_base 31: mod_base = OTHER; note = 2'-O-Methyl-uridine
  modified_base 32: mod_base = OTHER; note = 2'-O-Methyl-adenosine
  modified_base 33: mod_base = OTHER; note = 2'-O-Methyl-guanosine
  modified_base 34: mod_base = OTHER; note = 2'-O-Methyl-adenosine
  modified_base 35: mod_base = OTHER; note = 2'-O-Methyl-adenosine
  modified_base 36: mod_base = OTHER; note = 2'-O-Methyl-adenosine
  modified_base 37: mod_base = OTHER; note = 2'-O-Methyl-uridine
  modified_base 38: mod_base = OTHER; note = 2'-O-Methyl-adenosine
  modified_base 39: mod_base = OTHER; note = 2'-O-Methyl-guanosine
  modified_base 40: mod_base = OTHER; note = 2'-O-Methyl-cytidine
  modified_base 41: mod_base = OTHER; note = 2'-O-Methyl-adenosine
  modified_base 42: mod_base = OTHER; note = 2'-O-Methyl-adenosine
  modified_base 46: mod_base = OTHER; note = 2'-O-Methyl-adenosine
  modified_base 48: mod_base = OTHER; note = 2'-O-Methyl-adenosine
  modified_base 50: mod_base = OTHER; note = 2'-O-Methyl-uridine
  modified_base 52: mod_base = OTHER; note = 2'-O-Methyl-adenosine
  modified_base 53: mod_base = OTHER; note = 2'-O-Methyl-guanosine
  modified_base 54: mod_base = OTHER; note = 2'-O-Methyl-guanosine
  modified_base 57: mod_base = OTHER; note = 2'-O-Methyl-adenosine
  modified_base 61: mod_base = OTHER; note = 2'-O-Methyl-cytidine
  modified_base 66: mod_base = OTHER; note = 2'-O-Methyl-uridine
  modified_base 67: mod_base = OTHER; note = 2'-O-Methyl-cytidine
  modified_base 70: mod_base = OTHER; note = 2'-O-Methyl-cytidine
  modified_base 71: mod_base = OTHER; note = 2'-O-Methyl-uridine
  modified_base 72: mod_base = OTHER; note = 2'-O-Methyl-uridine
  modified_base 73: mod_base = OTHER; note = 2'-O-Methyl-guanosine
  modified_base 74: mod_base = OTHER; note = 2'-O-Methyl-adenosine
  modified_base 75: mod_base = OTHER; note = 2'-O-Methyl-adenosine
  modified_base 76: mod_base = OTHER; note = 2'-O-Methyl-adenosine
  modified_base 77: mod_base = OTHER; note = 2'-O-Methyl-adenosine
  modified_base 78: mod_base = OTHER; note = 2'-O-Methyl-adenosine
  modified_base 79: mod_base = OTHER; note = 2'-O-Methyl-guanosine
  modified_base 80: mod_base = OTHER; note = 2'-O-Methyl-uridine
  modified_base 82: mod_base = OTHER; note = 2'-O-Methyl-guanosine
  modified_base 83: mod_base = OTHER; note = 2'-O-Methyl-cytidine
  modified_base 84: mod_base = OTHER; note = 2'-O-Methyl-adenosine
  modified_base 85: mod_base = OTHER; note = 2'-O-Methyl-cytidine
  modified_base 86: mod_base = OTHER; note = 2'-O-Methyl-cytidine
  modified_base 87: mod_base = OTHER; note = 2'-O-Methyl-guanosine
  modified_base 89: mod_base = OTHER; note = 2'-O-Methyl-guanosine
  modified_base 91: mod_base = OTHER; note = 2'-O-Methyl-cytidine
  modified_base 92: mod_base = OTHER; note = 2'-O-Methyl-guanosine
  modified_base 93: mod_base = OTHER; note = 2'-O-Methyl-guanosine
  modified_base 94: mod_base = OTHER; note = 2'-O-Methyl-uridine
  modified_base 95: mod_base = OTHER; note = 2'-O-Methyl-guanosine
  modified_base 96: mod_base = OTHER; note = 2'-O-Methyl-cytidine
  modified_base 97: mod_base = OTHER; note = 2'-O-Methyl-uridine
  modified_base 98: mod_base = OTHER; note = 2'-O-Methyl-uridine phosphorothioate
  modified_base 99: mod_base = OTHER; note = 2'-O-Methyl-uridine phosphorothioate
  modified_base 100: mod_base = OTHER; note = 2'-O-Methyl-uridine
  misc_difference 101: note = a, c, g, inosine, u, deoxyadenosine, deoxyguanosine, deoxycytidine, deoxyinosine, thymine, ribonebularine, 2'-O-methylnebularine, or 2'-deoxynebularine
  misc_difference 102: note = a, c, g, inosine, u, deoxyadenosine, deoxyguanosine, deoxycytidine, deoxyinosine, thymine, ribonebularine, 2'-O-methylnebularine, or 2'-deoxynebularine
  misc_difference 103: note = a, c, g, inosine, u, deoxyadenosine, deoxyguanosine, deoxycytidine, deoxyinosine, thymine, ribonebularine, 2'-O-methylnebularine, or 2'-deoxynebularine

SEQ ID NO: 2977 - RNA, 103 nt, synthetic construct; identical to SEQ ID NO: 1797
  source 1..103: mol_type = other RNA
  modified_base 1: mod_base = OTHER; note = 2'-O-Methyl-cytidine phosphorothioate
  modified_base 2: mod_base = OTHER; note = 2'-O-Methyl-adenosine phosphorothioate
  modified_base 3: mod_base = OTHER; note = 2'-O-Methyl-guanosine phosphorothioate
  modified_base 21: mod_base = OTHER; note = 2'-O-Methyl-guanosine
  modified_base 25: mod_base = OTHER; note = uridine phosphorothioate
  modified_base 28: mod_base = OTHER; note = 2'-O-Methyl-adenosine
  modified_base 29: mod_base = OTHER; note = 2'-O-Methyl-guanosine
  modified_base 30: mod_base = OTHER; note = 2'-O-Methyl-cytidine
  modified_base 31: mod_base = OTHER; note = 2'-O-Methyl-uridine
  modified_base 32: mod_base = OTHER; note = 2'-O-Methyl-adenosine
  modified_base 34: mod_base = OTHER; note = 2'-O-Methyl-adenosine
  modified_base 35: mod_base = OTHER; note = 2'-O-Methyl-adenosine
  modified_base 36: mod_base = OTHER; note = 2'-O-Methyl-adenosine
  modified_base 37: mod_base = OTHER; note = 2'-O-Methyl-uridine
  modified_base 38: mod_base = OTHER; note = 2'-O-Methyl-adenosine
  modified_base 39: mod_base = OTHER; note = 2'-O-Methyl-guanosine
  modified_base 40: mod_base = OTHER; note = 2'-O-Methyl-cytidine
  modified_base 41: mod_base = OTHER; note = 2'-O-Methyl-adenosine
  modified_base 42: mod_base = OTHER; note = 2'-O-Methyl-adenosine
  modified_base 46: mod_base = OTHER; note = 2'-O-Methyl-adenosine
  modified_base 48: mod_base = OTHER; note = 2'-O-Methyl-adenosine
  modified_base 50: mod_base = OTHER; note = 2'-O-Methyl-uridine
  modified_base 52: mod_base = OTHER; note = 2'-O-Methyl-adenosine
  modified_base 53: mod_base = OTHER; note = 2'-O-Methyl-guanosine
  modified_base 54: mod_base = OTHER; note = 2'-O-Methyl-guanosine
  modified_base 57: mod_base = OTHER; note = 2'-O-Methyl-adenosine
  modified_base 61: mod_base = OTHER; note = 2'-O-Methyl-cytidine
  modified_base 66: mod_base = OTHER; note = 2'-O-Methyl-uridine
  modified_base 67: mod_base = OTHER; note = 2'-O-Methyl-cytidine
  modified_base 70: mod_base = OTHER; note = 2'-O-Methyl-cytidine
  modified_base 71: mod_base = OTHER; note = 2'-O-Methyl-uridine
  modified_base 72: mod_base = OTHER; note = 2'-O-Methyl-uridine
  modified_base 73: mod_base = OTHER; note = 2'-O-Methyl-guanosine
  modified_base 74: mod_base = OTHER; note = 2'-O-Methyl-adenosine
  modified_base 75: mod_base = OTHER; note = 2'-O-Methyl-adenosine
  modified_base 76: mod_base = OTHER; note = 2'-O-Methyl-adenosine
  modified_base 77: mod_base = OTHER; note = 2'-O-Methyl-adenosine
  modified_base 78: mod_base = OTHER; note = 2'-O-Methyl-adenosine
  modified_base 79: mod_base = OTHER; note = 2'-O-Methyl-guanosine
  modified_base 80: mod_base = OTHER; note = 2'-O-Methyl-uridine
  modified_base 82: mod_base = OTHER; note = 2'-O-Methyl-guanosine
  modified_base 83: mod_base = OTHER; note = 2'-O-Methyl-cytidine
  modified_base 84: mod_base = OTHER; note = 2'-O-Methyl-adenosine
  modified_base 85: mod_base = OTHER; note = 2'-O-Methyl-cytidine
  modified_base 86: mod_base = OTHER; note = 2'-O-Methyl-cytidine
  modified_base 87: mod_base = OTHER; note = 2'-O-Methyl-guanosine
  modified_base 89: mod_base = OTHER; note = 2'-O-Methyl-guanosine
  modified_base 91: mod_base = OTHER; note = 2'-O-Methyl-cytidine
  modified_base 92: mod_base = OTHER; note = 2'-O-Methyl-guanosine
  modified_base 93: mod_base = OTHER; note = 2'-O-Methyl-guanosine
  modified_base 94: mod_base = OTHER; note = 2'-O-Methyl-uridine
  modified_base 95: mod_base = OTHER; note = 2'-O-Methyl-guanosine
  modified_base 96: mod_base = OTHER; note = 2'-O-Methyl-cytidine
  modified_base 97: mod_base = OTHER; note = 2'-O-Methyl-uridine
  modified_base 98: mod_base = OTHER; note = 2'-O-Methyl-uridine phosphorothioate
  modified_base 99: mod_base = OTHER; note = 2'-O-Methyl-uridine phosphorothioate
  modified_base 100: mod_base = OTHER; note = 2'-O-Methyl-uridine
  misc_difference 101: note = a, c, g, inosine, u, deoxyadenosine, deoxyguanosine, deoxycytidine, deoxyinosine, thymine, ribonebularine, 2'-O-methylnebularine, or 2'-deoxynebularine
  misc_difference 102: note = a, c, g, inosine, u, deoxyadenosine, deoxyguanosine, deoxycytidine, deoxyinosine, thymine, ribonebularine, 2'-O-methylnebularine, or 2'-deoxynebularine
  misc_difference 103: note = a, c, g, inosine, u, deoxyadenosine, deoxyguanosine, deoxycytidine, deoxyinosine, thymine, ribonebularine, 2'-O-methylnebularine, or 2'-deoxynebularine

SEQ ID NO: 2978 - RNA, 103 nt, synthetic construct; identical to SEQ ID NO: 1797
  source 1..103: mol_type = other RNA
  modified_base 1: mod_base = OTHER; note = 2'-O-Methyl-cytidine phosphorothioate
  modified_base 2: mod_base = OTHER; note = 2'-O-Methyl-adenosine phosphorothioate
  modified_base 3: mod_base = OTHER; note = 2'-O-Methyl-guanosine phosphorothioate
  modified_base 21: mod_base = OTHER; note = 2'-O-Methyl-guanosine
  modified_base 25: mod_base = OTHER; note = uridine phosphorothioate
  modified_base 28: mod_base = OTHER; note = 2'-O-Methyl-adenosine
  modified_base 29: mod_base = OTHER; note = 2'-O-Methyl-guanosine
  modified_base 30: mod_base = OTHER; note = 2'-O-Methyl-cytidine
  modified_base 31: mod_base = OTHER; note = 2'-O-Methyl-uridine
  modified_base 32: mod_base = OTHER; note = 2'-O-Methyl-adenosine
  modified_base 34: mod_base = OTHER; note = 2'-O-Methyl-adenosine
  modified_base 35: mod_base = OTHER; note = 2'-O-Methyl-adenosine
  modified_base 36: mod_base = OTHER; note = 2'-O-Methyl-adenosine
  modified_base 37: mod_base = OTHER; note = 2'-O-Methyl-uridine
  modified_base 38: mod_base = OTHER; note = 2'-O-Methyl-adenosine
  modified_base 39: mod_base = OTHER; note = 2'-O-Methyl-guanosine
  modified_base 40: mod_base = OTHER; note = 2'-O-Methyl-cytidine
  modified_base 41: mod_base = OTHER; note = 2'-O-Methyl-adenosine
  modified_base 42: mod_base = OTHER; note = 2'-O-Methyl-adenosine
  modified_base 46: mod_base = OTHER; note = 2'-O-Methyl-adenosine
  modified_base 48: mod_base = OTHER; note = 2'-O-Methyl-adenosine
  modified_base 50: mod_base = OTHER; note = 2'-O-Methyl-uridine
  modified_base 52: mod_base = OTHER; note = 2'-O-Methyl-adenosine
  modified_base 53: mod_base = OTHER; note = 2'-O-Methyl-guanosine
  modified_base 54: mod_base = OTHER; note = 2'-O-Methyl-guanosine
  modified_base 55: mod_base = OTHER; note = 2'-O-Methyl-cytidine
  modified_base 56: mod_base = OTHER; note = 2'-O-Methyl-uridine
  modified_base 57: mod_base = OTHER; note = 2'-O-Methyl-adenosine
  modified_base 60: mod_base = OTHER; note = 2'-O-Methyl-cytidine
  modified_base 61: mod_base = OTHER; note = 2'-O-Methyl-cytidine
  modified_base 66: mod_base = OTHER; note = 2'-O-Methyl-uridine
  modified_base 67: mod_base = OTHER; note = 2'-O-Methyl-cytidine
  modified_base 70: mod_base = OTHER; note = 2'-O-Methyl-cytidine
  modified_base 71: mod_base = OTHER; note = 2'-O-Methyl-uridine
  modified_base 72: mod_base = OTHER; note = 2'-O-Methyl-uridine
  modified_base 74: mod_base = OTHER; note = 2'-O-Methyl-adenosine
  modified_base 75: mod_base = OTHER; note = 2'-O-Methyl-adenosine
  modified_base 76: mod_base = OTHER; note = 2'-O-Methyl-adenosine
  modified_base 77: mod_base = OTHER; note = 2'-O-Methyl-adenosine
  modified_base 78: mod_base = OTHER; note = 2'-O-Methyl-adenosine
  modified_base 79: mod_base = OTHER; note = 2'-O-Methyl-guanosine
  modified_base 80: mod_base = OTHER; note = 2'-O-Methyl-uridine
  modified_base 82: mod_base = OTHER; note = 2'-O-Methyl-guanosine
  modified_base 83: mod_base = OTHER; note = 2'-O-Methyl-cytidine
  modified_base 84: mod_base = OTHER; note = 2'-O-Methyl-adenosine
  modified_base 85: mod_base = OTHER; note = 2'-O-Methyl-cytidine
  modified_base 86: mod_base = OTHER; note = 2'-O-Methyl-cytidine
  modified_base 87: mod_base = OTHER; note = 2'-O-Methyl-guanosine
  modified_base 89: mod_base = OTHER; note = 2'-O-Methyl-guanosine
  modified_base 92: mod_base = OTHER; note = 2'-O-Methyl-guanosine
  modified_base 93: mod_base = OTHER; note = 2'-O-Methyl-guanosine
  modified_base 94: mod_base = OTHER; note = 2'-O-Methyl-uridine
  modified_base 95: mod_base = OTHER; note = 2'-O-Methyl-guanosine
  modified_base 96: mod_base = OTHER; note = 2'-O-Methyl-cytidine
  modified_base 97: mod_base = OTHER; note = 2'-O-Methyl-uridine
  modified_base 98: mod_base = OTHER; note = 2'-O-Methyl-uridine phosphorothioate
  modified_base 99: mod_base = OTHER; note = 2'-O-Methyl-uridine phosphorothioate
  modified_base 100: mod_base = OTHER; note = 2'-O-Methyl-uridine
  misc_difference 101: note = a, c, g, inosine, u, deoxyadenosine, deoxyguanosine, deoxycytidine, deoxyinosine, thymine, ribonebularine, 2'-O-methylnebularine, or 2'-deoxynebularine
  misc_difference 102: note = a, c, g, inosine, u, deoxyadenosine, deoxyguanosine, deoxycytidine, deoxyinosine, thymine, ribonebularine, 2'-O-methylnebularine, or 2'-deoxynebularine
  misc_difference 103: note = a, c, g, inosine, u, deoxyadenosine, deoxyguanosine, deoxycytidine, deoxyinosine, thymine, ribonebularine, 2'-O-methylnebularine, or 2'-deoxynebularine

SEQ ID NO: 2979 - RNA, 103 nt, synthetic construct; identical to SEQ ID NO: 1795
  source 1..103: mol_type = other RNA
  modified_base 1: mod_base = OTHER; note = 2'-O-Methyl-cytidine phosphorothioate
  modified_base 2: mod_base = OTHER; note = 2'-O-Methyl-cytidine phosphorothioate
  modified_base 3: mod_base = OTHER; note = 2'-O-Methyl-cytidine phosphorothioate
  modified_base 21: mod_base = OTHER; note = 2'-O-Methyl-guanosine
  modified_base 28: mod_base = OTHER; note = 2'-O-Methyl-adenosine
  modified_base 29: mod_base = OTHER; note = 2'-O-Methyl-guanosine
  modified_base 30: mod_base = OTHER; note = 2'-O-Methyl-cytidine
  modified_base 31: mod_base = OTHER; note = 2'-O-Methyl-uridine
  modified_base 32: mod_base = OTHER; note = 2'-O-Methyl-adenosine
  modified_base 33: mod_base = OTHER; note = 2'-O-Methyl-guanosine
  modified_base 34: mod_base = OTHER; note = 2'-O-Methyl-adenosine
  modified_base 35: mod_base = OTHER; note = 2'-O-Methyl-adenosine
  modified_base 36: mod_base = OTHER; note = 2'-O-Methyl-adenosine
  modified_base 37: mod_base = OTHER; note = 2'-O-Methyl-uridine
  modified_base 38: mod_base = OTHER; note = 2'-O-Methyl-adenosine
  modified_base 39: mod_base = OTHER; note = 2'-O-Methyl-guanosine
  modified_base 40: mod_base = OTHER; note = 2'-O-Methyl-cytidine
  modified_base 41: mod_base = OTHER; note = 2'-O-Methyl-adenosine
  modified_base 42: mod_base = OTHER; note = 2'-O-Methyl-adenosine
  modified_base 45: mod_base = OTHER; note = uridine phosphorothioate
  modified_base 46: mod_base = OTHER; note = 2'-O-Methyl-adenosine
  modified_base 48: mod_base = OTHER; note = 2'-O-Methyl-adenosine
  modified_base 50: mod_base = OTHER; note = 2'-O-Methyl-uridine
  modified_base 52: mod_base = OTHER; note = 2'-O-Methyl-adenosine
  modified_base 53: mod_base = OTHER; note = 2'-O-Methyl-guanosine
  modified_base 54: mod_base = OTHER; note = 2'-O-Methyl-guanosine
  modified_base 55: mod_base = OTHER; note = 2'-O-Methyl-cytidine
  modified_base 56: mod_base = OTHER; note = 2'-O-Methyl-uridine
  modified_base 57: mod_base = OTHER; note = 2'-O-Methyl-adenosine
  modified_base 60: mod_base = OTHER; note = 2'-O-Methyl-cytidine
  modified_base 61: mod_base = OTHER; note = 2'-O-Methyl-cytidine
  modified_base 64: mod_base = OTHER; note = uridine phosphorothioate
  modified_base 66: mod_base = OTHER; note = 2'-O-Methyl-uridine
  modified_base 67: mod_base = OTHER; note = 2'-O-Methyl-cytidine
  modified_base 70: mod_base = OTHER; note = 2'-O-Methyl-cytidine
  modified_base 71: mod_base = OTHER; note = 2'-O-Methyl-uridine
  modified_base 72: mod_base = OTHER; note = 2'-O-Methyl-uridine
  modified_base 73: mod_base = OTHER; note = 2'-O-Methyl-guanosine
  modified_base 74: mod_base = OTHER; note = 2'-O-Methyl-adenosine
  modified_base 75: mod_base = OTHER; note = 2'-O-Methyl-adenosine
  modified_base 76: mod_base = OTHER; note = 2'-O-Methyl-adenosine
  modified_base 77: mod_base = OTHER; note = 2'-O-Methyl-adenosine
  modified_base 78: mod_base = OTHER; note = 2'-O-Methyl-adenosine
  modified_base 79: mod_base = OTHER; note = 2'-O-Methyl-guanosine
  modified_base 80: mod_base = OTHER; note = 2'-O-Methyl-uridine
  modified_base 81: mod_base = OTHER; note = 2'-O-Methyl-guanosine
  modified_base 83: mod_base = OTHER; note = 2'-O-Methyl-cytidine
  modified_base 84: mod_base = OTHER; note = 2'-O-Methyl-adenosine
  modified_base 85: mod_base = OTHER; note = 2'-O-Methyl-cytidine
  modified_base 86: mod_base = OTHER; note = 2'-O-Methyl-cytidine
  modified_base 87: mod_base = OTHER; note = 2'-O-Methyl-guanosine
  modified_base 88: mod_base = OTHER; note = 2'-O-Methyl-adenosine
  modified_base 89: mod_base = OTHER; note = 2'-O-Methyl-guanosine
  modified_base 90: mod_base = OTHER; note = 2'-O-Methyl-uridine
  modified_base 91: mod_base = OTHER; note = 2'-O-Methyl-cytidine
  modified_base 92: mod_base = OTHER; note = 2'-O-Methyl-guanosine
  modified_base 93: mod_base = OTHER; note = 2'-O-Methyl-guanosine
  modified_base 94: mod_base = OTHER; note = 2'-O-Methyl-uridine
  modified_base 95: mod_base = OTHER; note = 2'-O-Methyl-guanosine
  modified_base 96: mod_base = OTHER; note = 2'-O-Methyl-cytidine
  modified_base 97: mod_base = OTHER; note = 2'-O-Methyl-uridine
  modified_base 98: mod_base = OTHER; note = 2'-O-Methyl-uridine phosphorothioate
  modified_base 99: mod_base = OTHER; note = 2'-O-Methyl-uridine phosphorothioate
  modified_base 100: mod_base = OTHER; note = 2'-O-Methyl-uridine
  misc_difference 101: note = a, c, g, inosine, u, deoxyadenosine, deoxyguanosine, deoxycytidine, deoxyinosine, thymine, ribonebularine, 2'-O-methylnebularine, or 2'-deoxynebularine
  misc_difference 102: note = a, c, g, inosine, u, deoxyadenosine, deoxyguanosine, deoxycytidine, deoxyinosine, thymine, ribonebularine, 2'-O-methylnebularine, or 2'-deoxynebularine
  misc_difference 103: note = a, c, g, inosine, u, deoxyadenosine, deoxyguanosine, deoxycytidine, deoxyinosine, thymine, ribonebularine, 2'-O-methylnebularine, or 2'-deoxynebularine

SEQ ID NO: 2980 - RNA, 103 nt, synthetic construct; identical to SEQ ID NO: 1795
  source 1..103: mol_type = other RNA
  modified_base 1: mod_base = OTHER; note = 2'-O-Methyl-cytidine phosphorothioate
  modified_base 2: mod_base = OTHER; note = 2'-O-Methyl-cytidine phosphorothioate
  modified_base 3: mod_base = OTHER; note = 2'-O-Methyl-cytidine phosphorothioate
  modified_base 21: mod_base = OTHER; note = 2'-O-Methyl-guanosine
  modified_base 28: mod_base = OTHER; note = 2'-O-Methyl-adenosine
  modified_base 29: mod_base = OTHER; note = 2'-O-Methyl-guanosine
  modified_base 30: mod_base = OTHER; note = 2'-O-Methyl-cytidine
  modified_base 31: mod_base = OTHER; note = 2'-O-Methyl-uridine
  modified_base 32: mod_base = OTHER; note = 2'-O-Methyl-adenosine
  modified_base 34: mod_base = OTHER; note = 2'-O-Methyl-adenosine
  modified_base 35: mod_base = OTHER; note = 2'-O-Methyl-adenosine
  modified_base 36: mod_base = OTHER; note = 2'-O-Methyl-adenosine
  modified_base 37: mod_base = OTHER; note = 2'-O-Methyl-uridine
  modified_base 38: mod_base = OTHER; note = 2'-O-Methyl-adenosine
  modified_base 39: mod_base = OTHER; note = 2'-O-Methyl-guanosine
  modified_base 40: mod_base = OTHER; note = 2'-O-Methyl-cytidine
  modified_base 41: mod_base = OTHER; note = 2'-O-Methyl-adenosine
  modified_base 42: mod_base = OTHER; note = 2'-O-Methyl-adenosine
  modified_base 45: mod_base = OTHER; note = uridine phosphorothioate
  modified_base 46: mod_base = OTHER; note = 2'-O-Methyl-adenosine
  modified_base 48: mod_base = OTHER; note = 2'-O-Methyl-adenosine
  modified_base 50: mod_base = OTHER; note = 2'-O-Methyl-uridine
  modified_base 52: mod_base = OTHER; note = 2'-O-Methyl-adenosine
  modified_base 53: mod_base = OTHER; note = 2'-O-Methyl-guanosine
  modified_base 54: mod_base = OTHER; note = 2'-O-Methyl-guanosine
  modified_base 55: mod_base = OTHER; note = 2'-O-Methyl-cytidine
  modified_base 56: mod_base = OTHER; note = 2'-O-Methyl-uridine
  modified_base 57: mod_base = OTHER; note = 2'-O-Methyl-adenosine
  modified_base 60: mod_base = OTHER; note = 2'-O-Methyl-cytidine
  modified_base 61: mod_base = OTHER; note = 2'-O-Methyl-cytidine
  modified_base 64: mod_base = OTHER; note = uridine phosphorothioate
  modified_base 66: mod_base = OTHER; note = 2'-O-Methyl-uridine
  modified_base 67: mod_base = OTHER; note = 2'-O-Methyl-cytidine
  modified_base 70: mod_base = OTHER; note = 2'-O-Methyl-cytidine
  modified_base 71: mod_base = OTHER; note = 2'-O-Methyl-uridine
  modified_base 72: mod_base = OTHER; note = 2'-O-Methyl-uridine
  modified_base 74: mod_base = OTHER; note = 2'-O-Methyl-adenosine
  modified_base 75: mod_base = OTHER; note = 2'-O-Methyl-adenosine
  modified_base 76: mod_base = OTHER; note = 2'-O-Methyl-adenosine
  modified_base 77: mod_base = OTHER; note = 2'-O-Methyl-adenosine
  modified_base 78: mod_base = OTHER; note = 2'-O-Methyl-adenosine
  modified_base 79: mod_base = OTHER; note = 2'-O-Methyl-guanosine
  modified_base 80: mod_base = OTHER; note = 2'-O-Methyl-uridine
  modified_base 81: mod_base = OTHER; note = 2'-O-Methyl-guanosine
  modified_base 83: mod_base = OTHER; note = 2'-O-Methyl-cytidine
  modified_base 84: mod_base = OTHER; note = 2'-O-Methyl-adenosine
  modified_base 85: mod_base = OTHER; note = 2'-O-Methyl-cytidine
  modified_base 86: mod_base = OTHER; note = 2'-O-Methyl-cytidine
  modified_base 87: mod_base = OTHER; note = 2'-O-Methyl-guanosine
  modified_base 88: mod_base = OTHER; note = 2'-O-Methyl-adenosine
  modified_base 89: mod_base = OTHER; note = 2'-O-Methyl-guanosine
  modified_base 90: mod_base = OTHER; note = 2'-O-Methyl-uridine
  modified_base 91: mod_base = OTHER; note = 2'-O-Methyl-cytidine
  modified_base 92: mod_base = OTHER; note = 2'-O-Methyl-guanosine
  modified_base 93: mod_base = OTHER; note = 2'-O-Methyl-guanosine
  modified_base 94: mod_base = OTHER; note = 2'-O-Methyl-uridine
  modified_base 95: mod_base = OTHER; note = 2'-O-Methyl-guanosine
  modified_base 96: mod_base = OTHER; note = 2'-O-Methyl-cytidine
  modified_base 97: mod_base = OTHER; note = 2'-O-Methyl-uridine
  modified_base 98: mod_base = OTHER; note = 2'-O-Methyl-uridine phosphorothioate
  modified_base 99: mod_base = OTHER; note = 2'-O-Methyl-uridine phosphorothioate
  modified_base 100: mod_base = OTHER; note = 2'-O-Methyl-uridine
  misc_difference 101: note = a, c, g, inosine, u, deoxyadenosine, deoxyguanosine, deoxycytidine, deoxyinosine, thymine, ribonebularine, 2'-O-methylnebularine, or 2'-deoxynebularine
  misc_difference 102: note = a, c, g, inosine, u, deoxyadenosine, deoxyguanosine, deoxycytidine, deoxyinosine, thymine, ribonebularine, 2'-O-methylnebularine, or 2'-deoxynebularine
  misc_difference 103: note = a, c, g, inosine, u, deoxyadenosine, deoxyguanosine, deoxycytidine, deoxyinosine, thymine, ribonebularine, 2'-O-methylnebularine, or 2'-deoxynebularine

SEQ ID NO: 2981 - RNA, 103 nt, synthetic construct; identical to SEQ ID NO: 1796
  source 1..103: mol_type = other RNA
  modified_base 1: mod_base = OTHER; note = 2'-O-Methyl-guanosine phosphorothioate
  modified_base 2: mod_base = OTHER; note = 2'-O-Methyl-adenosine phosphorothioate
  modified_base 3: mod_base = OTHER; note = 2'-O-Methyl-guanosine phosphorothioate
  modified_base 21: mod_base = OTHER; note = 2'-O-Methyl-guanosine
  modified_base 28: mod_base = OTHER; note = 2'-O-Methyl-adenosine
  modified_base 29: mod_base = OTHER; note = 2'-O-Methyl-guanosine
  modified_base 30: mod_base = OTHER; note = 2'-O-Methyl-cytidine
  modified_base 31: mod_base = OTHER; note = 2'-O-Methyl-uridine
  modified_base 32: mod_base = OTHER; note = 2'-O-Methyl-adenosine
  modified_base 33: mod_base = OTHER; note = 2'-O-Methyl-guanosine
  modified_base 34: mod_base = OTHER; note = 2'-O-Methyl-adenosine
  modified_base 35: mod_base = OTHER; note = 2'-O-Methyl-adenosine
  modified_base 36: mod_base = OTHER; note = 2'-O-Methyl-adenosine
  modified_base 37: mod_base = OTHER; note = 2'-O-Methyl-uridine
  modified_base 38: mod_base = OTHER; note = 2'-O-Methyl-adenosine
  modified_base 39: mod_base = OTHER; note = 2'-O-Methyl-guanosine
  modified_base 40: mod_base = OTHER; note = 2'-O-Methyl-cytidine
  modified_base 41: mod_base = OTHER; note = 2'-O-Methyl-adenosine
  modified_base 42: mod_base = OTHER; note = 2'-O-Methyl-adenosine
  modified_base 45: mod_base = OTHER; note = uridine phosphorothioate
  modified_base 46: mod_base = OTHER; note = 2'-O-Methyl-adenosine
  modified_base 48: mod_base = OTHER; note = 2'-O-Methyl-adenosine
  modified_base 50: mod_base = OTHER; note = 2'-O-Methyl-uridine
  modified_base 52: mod_base = OTHER; note = 2'-O-Methyl-adenosine
  modified_base 53: mod_base = OTHER; note = 2'-O-Methyl-guanosine
  modified_base 54: mod_base = OTHER; note = 2'-O-Methyl-guanosine
  modified_base 55: mod_base = OTHER; note = 2'-O-Methyl-cytidine
  modified_base 56: mod_base = OTHER; note = 2'-O-Methyl-uridine
  modified_base 57: mod_base = OTHER; note = 2'-O-Methyl-adenosine
  modified_base 60: mod_base = OTHER; note = 2'-O-Methyl-cytidine
  modified_base 61: mod_base = OTHER; note = 2'-O-Methyl-cytidine
  modified_base 64: mod_base = OTHER; note = uridine phosphorothioate
  modified_base 66: mod_base = OTHER; note = 2'-O-Methyl-uridine
  modified_base 67: mod_base = OTHER; note = 2'-O-Methyl-cytidine
  modified_base 70: mod_base = OTHER; note = 2'-O-Methyl-cytidine
  modified_base 71: mod_base = OTHER; note = 2'-O-Methyl-uridine
  modified_base 72: mod_base = OTHER; note = 2'-O-Methyl-uridine
  modified_base 73: mod_base = OTHER; note = 2'-O-Methyl-guanosine
  modified_base 74: mod_base = OTHER; note = 2'-O-Methyl-adenosine
  modified_base 75: mod_base = OTHER; note = 2'-O-Methyl-adenosine
  modified_base 76: mod_base = OTHER; note = 2'-O-Methyl-adenosine
  modified_base 77: mod_base = OTHER; note = 2'-O-Methyl-adenosine
  modified_base 78: mod_base = OTHER; note = 2'-O-Methyl-adenosine
  modified_base 79: mod_base = OTHER; note = 2'-O-Methyl-guanosine
  modified_base 80: mod_base = OTHER; note = 2'-O-Methyl-uridine
  modified_base 81: mod_base = OTHER; note = 2'-O-Methyl-guanosine
  modified_base 83: mod_base = OTHER; note = 2'-O-Methyl-cytidine
  modified_base 84: mod_base = OTHER; note = 2'-O-Methyl-adenosine
  modified_base 85: mod_base = OTHER; note = 2'-O-Methyl-cytidine
  modified_base 86: mod_base = OTHER; note = 2'-O-Methyl-cytidine
  modified_base 87: mod_base = OTHER; note = 2'-O-Methyl-guanosine
  modified_base 88: mod_base = OTHER; note = 2'-O-Methyl-adenosine
  modified_base 89: mod_base = OTHER; note = 2'-O-Methyl-guanosine
  modified_base 90: mod_base = OTHER; note = 2'-O-Methyl-uridine
  modified_base 91: mod_base = OTHER; note = 2'-O-Methyl-cytidine
  modified_base 92: mod_base = OTHER; note = 2'-O-Methyl-guanosine
  modified_base 93: mod_base = OTHER; note = 2'-O-Methyl-guanosine
  modified_base 94: mod_base = OTHER; note = 2'-O-Methyl-uridine
  modified_base 95: mod_base = OTHER; note = 2'-O-Methyl-guanosine
  modified_base 96: mod_base = OTHER; note = 2'-O-Methyl-cytidine
  modified_base 97: mod_base = OTHER; note = 2'-O-Methyl-uridine
  modified_base 98: mod_base = OTHER; note = 2'-O-Methyl-uridine phosphorothioate
  modified_base 99: mod_base = OTHER; note = 2'-O-Methyl-uridine phosphorothioate
  modified_base 100: mod_base = OTHER; note = 2'-O-Methyl-uridine
  misc_difference 101: note = a, c, g, inosine, u, deoxyadenosine, deoxyguanosine, deoxycytidine, deoxyinosine, thymine, ribonebularine, 2'-O-methylnebularine, or 2'-deoxynebularine
  misc_difference 102: note = a, c, g, inosine, u, deoxyadenosine, deoxyguanosine, deoxycytidine, deoxyinosine, thymine, ribonebularine, 2'-O-methylnebularine, or 2'-deoxynebularine
  misc_difference 103: note = a, c, g, inosine, u, deoxyadenosine, deoxyguanosine, deoxycytidine, deoxyinosine, thymine, ribonebularine, 2'-O-methylnebularine, or 2'-deoxynebularine

SEQ ID NO: 2982 - RNA, 103 nt, synthetic construct; identical to SEQ ID NO: 1796
  source 1..103: mol_type = other RNA
  modified_base 1: mod_base = OTHER; note = 2'-O-Methyl-guanosine phosphorothioate
  modified_base 2: mod_base = OTHER; note = 2'-O-Methyl-adenosine phosphorothioate
  modified_base 3: mod_base = OTHER; note = 2'-O-Methyl-guanosine phosphorothioate
  modified_base 21: mod_base = OTHER; note = 2'-O-Methyl-guanosine
  modified_base 28: mod_base = OTHER; note = 2'-O-Methyl-adenosine
  modified_base 29: mod_base = OTHER; note = 2'-O-Methyl-guanosine
  modified_base 30: mod_base = OTHER; note = 2'-O-Methyl-cytidine
  modified_base 31: mod_base = OTHER; note = 2'-O-Methyl-uridine
  modified_base 32: mod_base = OTHER; note = 2'-O-Methyl-adenosine
  modified_base 34: mod_base = OTHER; note = 2'-O-Methyl-adenosine
  modified_base 35: mod_base = OTHER; note = 2'-O-Methyl-adenosine
  modified_base 36: mod_base = OTHER; note = 2'-O-Methyl-adenosine
  modified_base 37: mod_base = OTHER; note = 2'-O-Methyl-uridine
  modified_base 38: mod_base = OTHER; note = 2'-O-Methyl-adenosine
  modified_base 39: mod_base = OTHER; note = 2'-O-Methyl-guanosine
  modified_base 40: mod_base = OTHER; note = 2'-O-Methyl-cytidine
  modified_base 41: mod_base = OTHER; note = 2'-O-Methyl-adenosine
  modified_base 42: mod_base = OTHER; note = 2'-O-Methyl-adenosine
  modified_base 45: mod_base = OTHER; note = uridine phosphorothioate
  modified_base 46: mod_base = OTHER; note = 2'-O-Methyl-adenosine
  modified_base 48: mod_base = OTHER; note = 2'-O-Methyl-adenosine
  modified_base 50: mod_base = OTHER; note = 2'-O-Methyl-uridine
  modified_base 52: mod_base = OTHER; note = 2'-O-Methyl-adenosine
  modified_base 53: mod_base = OTHER; note = 2'-O-Methyl-guanosine
  modified_base 54: mod_base = OTHER; note = 2'-O-Methyl-guanosine
  modified_base 55: mod_base = OTHER; note = 2'-O-Methyl-cytidine
  modified_base 56: mod_base = OTHER; note = 2'-O-Methyl-uridine
  modified_base 57: mod_base = OTHER; note = 2'-O-Methyl-adenosine
  modified_base 60: mod_base = OTHER; note = 2'-O-Methyl-cytidine
  modified_base 61: mod_base = OTHER; note = 2'-O-Methyl-cytidine
  modified_base 64: mod_base = OTHER; note = uridine phosphorothioate
  modified_base 66: mod_base = OTHER; note = 2'-O-Methyl-uridine
  modified_base 67: mod_base = OTHER; note = 2'-O-Methyl-cytidine
  modified_base 70: mod_base = OTHER; note = 2'-O-Methyl-cytidine
  modified_base 71: mod_base = OTHER; note = 2'-O-Methyl-uridine
  modified_base 72: mod_base = OTHER; note = 2'-O-Methyl-uridine
  modified_base 74: mod_base = OTHER; note = 2'-O-Methyl-adenosine
  modified_base 75: mod_base = OTHER; note = 2'-O-Methyl-adenosine
  modified_base 76: mod_base = OTHER; note = 2'-O-Methyl-adenosine
  modified_base 77: mod_base = OTHER; note = 2'-O-Methyl-adenosine
  modified_base 78: mod_base = OTHER; note = 2'-O-Methyl-adenosine
  modified_base 79: mod_base = OTHER; note = 2'-O-Methyl-guanosine
  modified_base 80: mod_base = OTHER; note = 2'-O-Methyl-uridine
  modified_base 81: mod_base = OTHER; note = 2'-O-Methyl-guanosine
  modified_base 83: mod_base = OTHER; note = 2'-O-Methyl-cytidine
  modified_base 84: mod_base = OTHER; note = 2'-O-Methyl-adenosine
  modified_base 85: mod_base = OTHER; note = 2'-O-Methyl-cytidine
  modified_base 86: mod_base = OTHER; note = 2'-O-Methyl-cytidine
  modified_base 87: mod_base = OTHER; note = 2'-O-Methyl-guanosine
  modified_base 88: mod_base = OTHER; note = 2'-O-Methyl-adenosine
  modified_base 89: mod_base = OTHER; note = 2'-O-Methyl-guanosine
  modified_base 90: mod_base = OTHER; note = 2'-O-Methyl-uridine
  modified_base 91: mod_base = OTHER; note = 2'-O-Methyl-cytidine
  modified_base 92: mod_base = OTHER; note = 2'-O-Methyl-guanosine
  modified_base 93: mod_base = OTHER; note = 2'-O-Methyl-guanosine
  modified_base 94: mod_base = OTHER; note = 2'-O-Methyl-uridine
  modified_base 95: mod_base = OTHER; note = 2'-O-Methyl-guanosine
  modified_base 96: mod_base = OTHER; note = 2'-O-Methyl-cytidine
  modified_base 97: mod_base = OTHER; note = 2'-O-Methyl-uridine
  modified_base 98: mod_base = OTHER; note = 2'-O-Methyl-uridine phosphorothioate
  modified_base 99: mod_base = OTHER; note = 2'-O-Methyl-uridine phosphorothioate
  modified_base 100: mod_base = OTHER; note = 2'-O-Methyl-uridine
  misc_difference 101: note = a, c, g, inosine, u, deoxyadenosine, deoxyguanosine, deoxycytidine, deoxyinosine, thymine, ribonebularine, 2'-O-methylnebularine, or 2'-deoxynebularine
  misc_difference 102: note = a, c, g, inosine, u, deoxyadenosine, deoxyguanosine, deoxycytidine, deoxyinosine, thymine, ribonebularine, 2'-O-methylnebularine, or 2'-deoxynebularine
  misc_difference 103: note = a, c, g, inosine, u, deoxyadenosine, deoxyguanosine, deoxycytidine, deoxyinosine, thymine, ribonebularine, 2'-O-methylnebularine, or 2'-deoxynebularine

SEQ ID NO: 2983 - RNA, 103 nt, synthetic construct; identical to SEQ ID NO: 1797
  source 1..103: mol_type = other RNA
  modified_base 1: mod_base = OTHER; note = 2'-O-Methyl-cytidine phosphorothioate
  modified_base 2: mod_base = OTHER; note = 2'-O-Methyl-adenosine phosphorothioate
  modified_base 3: mod_base = OTHER; note = 2'-O-Methyl-guanosine phosphorothioate
  modified_base 21: mod_base = OTHER; note = 2'-O-Methyl-guanosine
  modified_base 28: mod_base = OTHER; note = 2'-O-Methyl-adenosine
  modified_base 29: mod_base = OTHER; note = 2'-O-Methyl-guanosine
  modified_base 30: mod_base = OTHER; note = 2'-O-Methyl-cytidine
  modified_base 31: mod_base = OTHER; note = 2'-O-Methyl-uridine
  modified_base 32: mod_base = OTHER; note = 2'-O-Methyl-adenosine
  modified_base 33: mod_base = OTHER; note = 2'-O-Methyl-guanosine
  modified_base 34: mod_base = OTHER; note = 2'-O-Methyl-adenosine
  modified_base 35: mod_base = OTHER; note = 2'-O-Methyl-adenosine
  modified_base 36: mod_base = OTHER; note = 2'-O-Methyl-adenosine
  modified_base 37: mod_base = OTHER; note = 2'-O-Methyl-uridine
  modified_base 38: mod_base = OTHER; note = 2'-O-Methyl-adenosine
  modified_base 39: mod_base = OTHER; note = 2'-O-Methyl-guanosine
  modified_base 40: mod_base = OTHER; note = 2'-O-Methyl-cytidine
  modified_base 41: mod_base = OTHER; note = 2'-O-Methyl-adenosine
  modified_base 42: mod_base = OTHER; note = 2'-O-Methyl-adenosine
  modified_base 45: mod_base = OTHER; note = uridine phosphorothioate
  modified_base 46: mod_base = OTHER; note = 2'-O-Methyl-adenosine
  modified_base 48: mod_base = OTHER; note = 2'-O-Methyl-adenosine
  modified_base 50: mod_base = OTHER; note = 2'-O-Methyl-uridine
  modified_base 52: mod_base = OTHER; note = 2'-O-Methyl-adenosine
  modified_base 53: mod_base = OTHER; note = 2'-O-Methyl-guanosine
  modified_base 54: mod_base = OTHER; note = 2'-O-Methyl-guanosine
  modified_base 57: mod_base = OTHER; note = 2'-O-Methyl-adenosine
  modified_base 61: mod_base = OTHER; note = 2'-O-Methyl-cytidine
  modified_base 64: mod_base = OTHER; note = uridine phosphorothioate
  modified_base 66: mod_base = OTHER; note = 2'-O-Methyl-uridine
  modified_base 67: mod_base = OTHER; note = 2'-O-Methyl-cytidine
  modified_base 70: mod_base = OTHER; note = 2'-O-Methyl-cytidine
  modified_base 71: mod_base = OTHER; note = 2'-O-Methyl-uridine
  modified_base 72: mod_base = OTHER; note = 2'-O-Methyl-uridine
  modified_base 74: mod_base = OTHER; note = 2'-O-Methyl-adenosine
  modified_base 75: mod_base = OTHER; note = 2'-O-Methyl-adenosine
  modified_base 76: mod_base = OTHER; note = 2'-O-Methyl-adenosine
  modified_base 77: mod_base = OTHER; note = 2'-O-Methyl-adenosine
  modified_base 78: mod_base = OTHER; note = 2'-O-Methyl-adenosine
  modified_base 79: mod_base = OTHER; note = 2'-O-Methyl-guanosine
  modified_base 80: mod_base = OTHER; note = 2'-O-Methyl-uridine
  modified_base 82: mod_base = OTHER; note = 2'-O-Methyl-guanosine
  modified_base 83: mod_base = OTHER; note = 2'-O-Methyl-cytidine
  modified_base 84: mod_base = OTHER; note = 2'-O-Methyl-adenosine
  modified_base 85: mod_base = OTHER; note = 2'-O-Methyl-cytidine
  modified_base 86: mod_base = OTHER; note = 2'-O-Methyl-cytidine
  modified_base 87: mod_base = OTHER; note = 2'-O-Methyl-guanosine
  modified_base 89: mod_base = OTHER; note = 2'-O-Methyl-guanosine
  modified_base 92: mod_base = OTHER; note = 2'-O-Methyl-guanosine
  modified_base 93: mod_base = OTHER; note = 2'-O-Methyl-guanosine
  modified_base 94: mod_base = OTHER; note = 2'-O-Methyl-uridine
  modified_base 95: mod_base = OTHER; note = 2'-O-Methyl-guanosine
  modified_base 96: mod_base = OTHER; note = 2'-O-Methyl-cytidine
  modified_base 97: mod_base = OTHER; note = 2'-O-Methyl-uridine
  modified_base 98: mod_base = OTHER; note = 2'-O-Methyl-uridine phosphorothioate
  modified_base 99: mod_base = OTHER; note = 2'-O-Methyl-uridine phosphorothioate
  modified_base 100: mod_base = OTHER; note = 2'-O-Methyl-uridine
  misc_difference 101: note = a, c, g, inosine, u, deoxyadenosine, deoxyguanosine, deoxycytidine, deoxyinosine, thymine, ribonebularine, 2'-O-methylnebularine, or 2'-deoxynebularine
  misc_difference 102: note = a, c, g, inosine, u, deoxyadenosine, deoxyguanosine, deoxycytidine, deoxyinosine, thymine, ribonebularine, 2'-O-methylnebularine, or 2'-deoxynebularine
  misc_difference 103: note = a, c, g, inosine, u, deoxyadenosine, deoxyguanosine, deoxycytidine, deoxyinosine, thymine, ribonebularine, 2'-O-methylnebularine, or 2'-deoxynebularine

SEQ ID NO: 2984 - RNA, 103 nt, synthetic construct; identical to SEQ ID NO: 1797
  source 1..103: mol_type = other RNA
  modified_base 1: mod_base = OTHER; note = 2'-O-Methyl-cytidine phosphorothioate
  modified_base 2: mod_base = OTHER; note = 2'-O-Methyl-adenosine phosphorothioate
  modified_base 3: mod_base = OTHER; note = 2'-O-Methyl-guanosine phosphorothioate
  modified_base 21: mod_base = OTHER; note = 2'-O-Methyl-guanosine
  modified_base 28: mod_base = OTHER; note = 2'-O-Methyl-adenosine
  modified_base 29: mod_base = OTHER; note = 2'-O-Methyl-guanosine
  modified_base 30: mod_base = OTHER; note = 2'-O-Methyl-cytidine
  modified_base 31: mod_base = OTHER; note = 2'-O-Methyl-uridine
  modified_base 32: mod_base = OTHER; note = 2'-O-Methyl-adenosine
  modified_base 33: mod_base = OTHER; note = 2'-O-Methyl-guanosine
  modified_base 34: mod_base = OTHER; note = 2'-O-Methyl-adenosine
  modified_base 35: mod_base = OTHER; note = 2'-O-Methyl-adenosine
  modified_base 36: mod_base = OTHER; note = 2'-O-Methyl-adenosine
  modified_base 37: mod_base = OTHER; note = 2'-O-Methyl-uridine
  modified_base 38: mod_base = OTHER; note = 2'-O-Methyl-adenosine
  modified_base 39: mod_base = OTHER; note = 2'-O-Methyl-guanosine
  modified_base 40: mod_base = OTHER; note = 2'-O-Methyl-cytidine
  modified_base 41: mod_base = OTHER; note = 2'-O-Methyl-adenosine
  modified_base 42: mod_base = OTHER; note = 2'-O-Methyl-adenosine
  modified_base 45: mod_base = OTHER; note = uridine phosphorothioate
  modified_base 46: mod_base = OTHER; note = 2'-O-Methyl-adenosine
  modified_base 48: mod_base = OTHER; note = 2'-O-Methyl-adenosine
  modified_base 50: mod_base = OTHER; note = 2'-O-Methyl-uridine
  modified_base 52: mod_base = OTHER; note = 2'-O-Methyl-adenosine
  modified_base 53: mod_base = OTHER; note = 2'-O-Methyl-guanosine
  modified_base 54: mod_base = OTHER; note = 2'-O-Methyl-guanosine
  modified_base 55: mod_base = OTHER; note = 2'-O-Methyl-cytidine
  modified_base 56: mod_base = OTHER; note = 2'-O-Methyl-uridine
  modified_base 57: mod_base = OTHER; note = 2'-O-Methyl-adenosine
  modified_base 60: mod_base = OTHER; note = 2'-O-Methyl-cytidine
  modified_base 61: mod_base = OTHER; note = 2'-O-Methyl-cytidine
  modified_base 64: mod_base = OTHER; note = uridine phosphorothioate
  modified_base 66: mod_base = OTHER; note = 2'-O-Methyl-uridine
  modified_base 67: mod_base = OTHER; note = 2'-O-Methyl-cytidine
  modified_base 70: mod_base = OTHER; note = 2'-O-Methyl-cytidine
  modified_base 71: mod_base = OTHER; note = 2'-O-Methyl-uridine
  modified_base 72: mod_base = OTHER; note = 2'-O-Methyl-uridine
  modified_base 74: mod_base = OTHER; note = 2'-O-Methyl-adenosine
  modified_base 75: mod_base = OTHER; note = 2'-O-Methyl-adenosine
  modified_base 76: mod_base = OTHER; note = 2'-O-Methyl-adenosine
  modified_base 77: mod_base = OTHER; note = 2'-O-Methyl-adenosine
  modified_base 78: mod_base = OTHER; note = 2'-O-Methyl-adenosine
  modified_base 79: mod_base = OTHER; note = 2'-O-Methyl-guanosine
  modified_base 80: mod_base = OTHER; note = 2'-O-Methyl-uridine
  modified_base 82: mod_base = OTHER; note = 2'-O-Methyl-guanosine
  modified_base 83: mod_base = OTHER; note = 2'-O-Methyl-cytidine
  modified_base 84: mod_base = OTHER; note = 2'-O-Methyl-adenosine
  modified_base 85: mod_base = OTHER; note = 2'-O-Methyl-cytidine
  modified_base 86: mod_base = OTHER; note = 2'-O-Methyl-cytidine
  modified_base 87: mod_base = OTHER; note = 2'-O-Methyl-guanosine
  modified_base 89: mod_base = OTHER; note = 2'-O-Methyl-guanosine
  modified_base 92: mod_base = OTHER; note = 2'-O-Methyl-guanosine
  modified_base 93: mod_base = OTHER; note = 2'-O-Methyl-guanosine
  modified_base 94: mod_base = OTHER; note = 2'-O-Methyl-uridine
  modified_base 95: mod_base = OTHER; note = 2'-O-Methyl-guanosine
  modified_base 96: mod_base = OTHER; note = 2'-O-Methyl-cytidine
  modified_base 97: mod_base = OTHER; note = 2'-O-Methyl-uridine
  modified_base 98: mod_base = OTHER; note = 2'-O-Methyl-uridine phosphorothioate
  modified_base 99: mod_base = OTHER; note = 2'-O-Methyl-uridine phosphorothioate
  modified_base 100: mod_base = OTHER; note = 2'-O-Methyl-uridine
  misc_difference 101: note = a, c, g, inosine, u, deoxyadenosine, deoxyguanosine, deoxycytidine, deoxyinosine, thymine, ribonebularine, 2'-O-methylnebularine, or 2'-deoxynebularine
  misc_difference 102: note = a, c, g, inosine, u, deoxyadenosine, deoxyguanosine, deoxycytidine, deoxyinosine, thymine, ribonebularine, 2'-O-methylnebularine, or 2'-deoxynebularine
  misc_difference 103: note = a, c, g, inosine, u, deoxyadenosine, deoxyguanosine, deoxycytidine, deoxyinosine, thymine, ribonebularine, 2'-O-methylnebularine, or 2'-deoxynebularine

SEQ ID NO: 2985 - RNA, 103 nt, synthetic construct; identical to SEQ ID NO: 1797
  source 1..103: mol_type = other RNA
  modified_base 1: mod_base = OTHER; note = 2'-O-Methyl-cytidine phosphorothioate
  modified_base 2: mod_base = OTHER; note = 2'-O-Methyl-adenosine phosphorothioate
  modified_base 3: mod_base = OTHER; note = 2'-O-Methyl-guanosine phosphorothioate
  modified_base 21: mod_base = OTHER; note = 2'-O-Methyl-guanosine
  modified_base 28: mod_base = OTHER; note = 2'-O-Methyl-adenosine
  modified_base 29: mod_base = OTHER; note = 2'-O-Methyl-guanosine
  modified_base 30: mod_base = OTHER; note = 2'-O-Methyl-cytidine
  modified_base 31: mod_base = OTHER; note = 2'-O-Methyl-uridine
  modified_base 32: mod_base = OTHER; note = 2'-O-Methyl-adenosine
  modified_base 33: mod_base = OTHER; note = 2'-O-Methyl-guanosine
  modified_base 34: mod_base = OTHER; note = 2'-O-Methyl-adenosine
  modified_base 35: mod_base = OTHER; note = 2'-O-Methyl-adenosine
  modified_base 36: mod_base = OTHER; note = 2'-O-Methyl-adenosine
  modified_base 37: mod_base = OTHER; note = 2'-O-Methyl-uridine
  modified_base 38: mod_base = OTHER; note = 2'-O-Methyl-adenosine
  modified_base 39: mod_base = OTHER; note = 2'-O-Methyl-guanosine
  modified_base 40: mod_base = OTHER; note = 2'-O-Methyl-cytidine
  modified_base 41: mod_base = OTHER; note = 2'-O-Methyl-adenosine
  modified_base 42: mod_base = OTHER; note = 2'-O-Methyl-adenosine
  modified_base 45: mod_base = OTHER; note = uridine phosphorothioate
  modified_base 46: mod_base = OTHER; note = 2'-O-Methyl-adenosine
  modified_base 48: mod_base = OTHER; note = 2'-O-Methyl-adenosine
  modified_base 50: mod_base = OTHER; note = 2'-O-Methyl-uridine
  modified_base 52: mod_base = OTHER; note = 2'-O-Methyl-adenosine
  modified_base 53: mod_base = OTHER; note = 2'-O-Methyl-guanosine
  modified_base 54: mod_base = OTHER; note = 2'-O-Methyl-guanosine
  modified_base 57: mod_base = OTHER; note = 2'-O-Methyl-adenosine
  modified_base 61: mod_base = OTHER; note = 2'-O-Methyl-cytidine
  modified_base 64: mod_base = OTHER; note = uridine phosphorothioate
  modified_base 66: mod_base = OTHER; note = 2'-O-Methyl-uridine
  modified_base 67: mod_base = OTHER; note = 2'-O-Methyl-cytidine
  modified_base 70: mod_base = OTHER; note = 2'-O-Methyl-cytidine
  modified_base 71: mod_base = OTHER; note = 2'-O-Methyl-uridine
  modified_base 72: mod_base = OTHER; note = 2'-O-Methyl-uridine
  modified_base 73: mod_base = OTHER; note = 2'-O-Methyl-guanosine
  modified_base 74: mod_base = OTHER; note = 2'-O-Methyl-adenosine
  modified_base 75: mod_base = OTHER; note = 2'-O-Methyl-adenosine
  modified_base 76: mod_base = OTHER; note = 2'-O-Methyl-adenosine
  modified_base 77: mod_base = OTHER; note = 2'-O-Methyl-adenosine
  modified_base 78: mod_base = OTHER; note = 2'-O-Methyl-adenosine
  modified_base 79: mod_base = OTHER; note = 2'-O-Methyl-guanosine
  modified_base 80: mod_base = OTHER; note = 2'-O-Methyl-uridine
  modified_base 82: mod_base = OTHER; note = 2'-O-Methyl-guanosine
  modified_base 83: mod_base = OTHER; note = 2'-O-Methyl-cytidine
  modified_base 84: mod_base = OTHER; note = 2'-O-Methyl-adenosine
  modified_base 85: mod_base = OTHER; note = 2'-O-Methyl-cytidine
  modified_base 86: mod_base = OTHER; note = 2'-O-Methyl-cytidine
  modified_base 87: mod_base = OTHER; note = 2'-O-Methyl-guanosine
  modified_base 89: mod_base = OTHER; note = 2'-O-Methyl-guanosine
  modified_base 92: mod_base = OTHER; note = 2'-O-Methyl-guanosine
  modified_base 93: mod_base = OTHER; note = 2'-O-Methyl-guanosine
  modified_base 94: mod_base = OTHER; note = 2'-O-Methyl-uridine
  modified_base 95: mod_base = OTHER; note = 2'-O-Methyl-guanosine
  modified_base 96: mod_base = OTHER; note = 2'-O-Methyl-cytidine
  modified_base 97: mod_base = OTHER; note = 2'-O-Methyl-uridine
  modified_base 98: mod_base = OTHER; note = 2'-O-Methyl-uridine phosphorothioate
  modified_base 99: mod_base = OTHER; note = 2'-O-Methyl-uridine phosphorothioate
  modified_base 100: mod_base = OTHER; note = 2'-O-Methyl-uridine
  misc_difference 101: note = a, c, g, inosine, u, deoxyadenosine, deoxyguanosine, deoxycytidine, deoxyinosine, thymine, ribonebularine, 2'-O-methylnebularine, or 2'-deoxynebularine
  misc_difference 102: note = a, c, g, inosine, u, deoxyadenosine, deoxyguanosine, deoxycytidine, deoxyinosine, thymine, ribonebularine, 2'-O-methylnebularine, or 2'-deoxynebularine
  misc_difference 103: note = a, c, g, inosine, u, deoxyadenosine, deoxyguanosine, deoxycytidine, deoxyinosine, thymine, ribonebularine, 2'-O-methylnebularine, or 2'-deoxynebularine

SEQ ID NO: 2986 - RNA, 103 nt, synthetic construct; identical to SEQ ID NO: 1797
  source 1..103: mol_type = other RNA
  modified_base 1: mod_base = OTHER; note = 2'-O-Methyl-cytidine phosphorothioate
  modified_base 2: mod_base = OTHER; note = 2'-O-Methyl-adenosine phosphorothioate
  modified_base 3: mod_base = OTHER; note = 2'-O-Methyl-guanosine phosphorothioate
  modified_base 21: mod_base = OTHER; note = 2'-O-Methyl-guanosine
  modified_base 28: mod_base = OTHER; note = 2'-O-Methyl-adenosine
  modified_base 29: mod_base = OTHER; note = 2'-O-Methyl-guanosine
  modified_base 30: mod_base = OTHER; note = 2'-O-Methyl-cytidine
  modified_base 31: mod_base = OTHER; note = 2'-O-Methyl-uridine
  modified_base 32: mod_base = OTHER; note = 2'-O-Methyl-adenosine
  modified_base 34: mod_base = OTHER; note = 2'-O-Methyl-adenosine
  modified_base 35: mod_base = OTHER; note = 2'-O-Methyl-adenosine
  modified_base 36: mod_base = OTHER; note = 2'-O-Methyl-adenosine
  modified_base 37: mod_base = OTHER; note = 2'-O-Methyl-uridine
  modified_base 38: mod_base = OTHER; note = 2'-O-Methyl-adenosine
  modified_base 39: mod_base = OTHER; note = 2'-O-Methyl-guanosine
  modified_base 40: mod_base = OTHER; note = 2'-O-Methyl-cytidine
  modified_base 41: mod_base = OTHER; note = 2'-O-Methyl-adenosine
  modified_base 42: mod_base = OTHER; note = 2'-O-Methyl-adenosine
  modified_base 45: mod_base = OTHER; note = uridine phosphorothioate
  modified_base 46: mod_base = OTHER; note = 2'-O-Methyl-adenosine
  modified_base 48: mod_base = OTHER; note = 2'-O-Methyl-adenosine
  modified_base 50: mod_base = OTHER; note = 2'-O-Methyl-uridine
  modified_base 52: mod_base = OTHER; note = 2'-O-Methyl-adenosine
  modified_base 53: mod_base = OTHER; note = 2'-O-Methyl-guanosine
  modified_base 54: mod_base = OTHER; note = 2'-O-Methyl-guanosine
  modified_base 57: mod_base = OTHER; note = 2'-O-Methyl-adenosine
  modified_base 61: mod_base = OTHER; note = 2'-O-Methyl-cytidine
  modified_base 64: mod_base = OTHER; note = uridine phosphorothioate
  modified_base 66: mod_base = OTHER; note = 2'-O-Methyl-uridine
  modified_base 67: mod_base = OTHER; note = 2'-O-Methyl-cytidine
  modified_base 70: mod_base = OTHER; note = 2'-O-Methyl-cytidine
  modified_base 71: mod_base = OTHER; note = 2'-O-Methyl-uridine
  modified_base 72: mod_base = OTHER; note = 2'-O-Methyl-uridine
  modified_base 73: mod_base = OTHER; note = 2'-O-Methyl-guanosine
  modified_base 74: mod_base = OTHER; note = 2'-O-Methyl-adenosine
  modified_base 75: mod_base = OTHER; note = 2'-O-Methyl-adenosine
  modified_base 76: mod_base = OTHER; note = 2'-O-Methyl-adenosine
  modified_base 77: mod_base = OTHER; note = 2'-O-Methyl-adenosine
  modified_base 78: mod_base = OTHER; note = 2'-O-Methyl-adenosine
  modified_base 79: mod_base = OTHER; note = 2'-O-Methyl-guanosine
  modified_base 80: mod_base = OTHER; note = 2'-O-Methyl-uridine
  modified_base 82: mod_base = OTHER; note = 2'-O-Methyl-guanosine
  modified_base 83: mod_base = OTHER; note = 2'-O-Methyl-cytidine
  modified_base 84: mod_base = OTHER; note = 2'-O-Methyl-adenosine
  modified_base 85: mod_base = OTHER; note = 2'-O-Methyl-cytidine
  modified_base 86: mod_base = OTHER; note = 2'-O-Methyl-cytidine
  modified_base 87: mod_base = OTHER; note = 2'-O-Methyl-guanosine
  modified_base 89: mod_base = OTHER; note = 2'-O-Methyl-guanosine
  modified_base 92: mod_base = OTHER; note = 2'-O-Methyl-guanosine
  modified_base 93: mod_base = OTHER; note = 2'-O-Methyl-guanosine
  modified_base 94: mod_base = OTHER; note = 2'-O-Methyl-uridine
  modified_base 95: mod_base = OTHER; note = 2'-O-Methyl-guanosine
  modified_base 96: mod_base = OTHER; note = 2'-O-Methyl-cytidine
  modified_base 97: mod_base = OTHER; note = 2'-O-Methyl-uridine
  modified_base 98: mod_base = OTHER; note = 2'-O-Methyl-uridine phosphorothioate
  modified_base 99: mod_base = OTHER; note = 2'-O-Methyl-uridine phosphorothioate
  modified_base 100: mod_base = OTHER; note = 2'-O-Methyl-uridine
  misc_difference 101: note = a, c, g, inosine, u, deoxyadenosine, deoxyguanosine, deoxycytidine, deoxyinosine, thymine, ribonebularine, 2'-O-methylnebularine, or 2'-deoxynebularine
  misc_difference 102: note = a, c, g, inosine, u, deoxyadenosine, deoxyguanosine, deoxycytidine, deoxyinosine, thymine, ribonebularine, 2'-O-methylnebularine, or 2'-deoxynebularine
  misc_difference 103: note = a, c, g, inosine, u, deoxyadenosine, deoxyguanosine, deoxycytidine, deoxyinosine, thymine, ribonebularine, 2'-O-methylnebularine, or 2'-deoxynebularine

SEQ ID NO: 2987 - RNA, 103 nt, synthetic construct; identical to SEQ ID NO: 1797
  source 1..103: mol_type = other RNA
  modified_base 1: mod_base = OTHER; note = 2'-O-Methyl-cytidine phosphorothioate
  modified_base 2: mod_base = OTHER; note = 2'-O-Methyl-adenosine phosphorothioate
  modified_base 3: mod_base = OTHER; note = 2'-O-Methyl-guanosine phosphorothioate
  modified_base 21: mod_base = OTHER; note = 2'-O-Methyl-guanosine
  modified_base 28: mod_base = OTHER; note = 2'-O-Methyl-adenosine
  modified_base 29: mod_base = OTHER; note = 2'-O-Methyl-guanosine
  modified_base 30: mod_base = OTHER; note = 2'-O-Methyl-cytidine
  modified_base 31: mod_base = OTHER; note = 2'-O-Methyl-uridine
  modified_base 32: mod_base = OTHER; note = 2'-O-Methyl-adenosine
  modified_base 34: mod_base = OTHER; note = 2'-O-Methyl-adenosine
  modified_base 35: mod_base = OTHER; note = 2'-O-Methyl-adenosine
  modified_base 36: mod_base = OTHER; note = 2'-O-Methyl-adenosine
  modified_base 37: mod_base = OTHER; note = 2'-O-Methyl-uridine
  modified_base 38: mod_base = OTHER; note = 2'-O-Methyl-adenosine
  modified_base 39: mod_base = OTHER; note = 2'-O-Methyl-guanosine
  modified_base 40: mod_base = OTHER; note = 2'-O-Methyl-cytidine
  modified_base 41: mod_base = OTHER; note = 2'-O-Methyl-adenosine
  modified_base 42: mod_base = OTHER; note = 2'-O-Methyl-adenosine
  modified_base 45: mod_base = OTHER; note = uridine phosphorothioate
  modified_base 46: mod_base = OTHER; note = 2'-O-Methyl-adenosine
  modified_base 48: mod_base = OTHER; note = 2'-O-Methyl-adenosine
  modified_base 50: mod_base = OTHER; note = 2'-O-Methyl-uridine
  modified_base 52: mod_base = OTHER; note = 2'-O-Methyl-adenosine
  modified_base 53: mod_base = OTHER; note = 2'-O-Methyl-guanosine
  modified_base 54: mod_base = OTHER; note = 2'-O-Methyl-guanosine
  modified_base 57: mod_base = OTHER; note = 2'-O-Methyl-adenosine
  modified_base 61: mod_base = OTHER; note = 2'-O-Methyl-cytidine
  modified_base 64: mod_base = OTHER; note = uridine phosphorothioate
  modified_base 66: mod_base = OTHER; note = 2'-O-Methyl-uridine
  modified_base 67: mod_base = OTHER; note = 2'-O-Methyl-cytidine
  modified_base 70: mod_base = OTHER; note = 2'-O-Methyl-cytidine
  modified_base 71: mod_base = OTHER; note = 2'-O-Methyl-uridine
  modified_base 72: mod_base = OTHER; note = 2'-O-Methyl-uridine
  modified_base 73: mod_base = OTHER; note = 2'-O-Methyl-guanosine
  modified_base 74: mod_base = OTHER; note = 2'-O-Methyl-adenosine
  modified_base 75: mod_base = OTHER; note = 2'-O-Methyl-adenosine
  modified_base 76: mod_base = OTHER; note = 2'-O-Methyl-adenosine
  modified_base 77: mod_base = OTHER; note = 2'-O-Methyl-adenosine
  modified_base 78: mod_base = OTHER; note = 2'-O-Methyl-adenosine
  modified_base 79: mod_base = OTHER; note = 2'-O-Methyl-guanosine
  modified_base 80: mod_base = OTHER; note = 2'-O-Methyl-uridine
  modified_base 82: mod_base = OTHER; note = 2'-O-Methyl-guanosine
  modified_base 83: mod_base = OTHER; note = 2'-O-Methyl-cytidine
  modified_base 84: mod_base = OTHER; note = 2'-O-Methyl-adenosine
  modified_base 85: mod_base = OTHER; note = 2'-O-Methyl-cytidine
  modified_base 86: mod_base = OTHER; note = 2'-O-Methyl-cytidine
  modified_base 87: mod_base = OTHER; note = 2'-O-Methyl-guanosine
  modified_base 89: mod_base = OTHER; note = 2'-O-Methyl-guanosine
  modified_base 91: mod_base = OTHER; note = 2'-O-Methyl-cytidine
  modified_base 92: mod_base = OTHER; note = 2'-O-Methyl-guanosine
  modified_base 93: mod_base = OTHER; note = 2'-O-Methyl-guanosine
  modified_base 94: mod_base = OTHER; note = 2'-O-Methyl-uridine
  modified_base 95: mod_base = OTHER; note = 2'-O-Methyl-guanosine
  modified_base 96: mod_base = OTHER; note = 2'-O-Methyl-cytidine
  modified_base 97: mod_base = OTHER; note = 2'-O-Methyl-uridine
  modified_base 98: mod_base = OTHER; note = 2'-O-Methyl-uridine phosphorothioate
  modified_base 99: mod_base = OTHER; note = 2'-O-Methyl-uridine phosphorothioate
  modified_base 100: mod_base = OTHER; note = 2'-O-Methyl-uridine
  misc_difference 101: note = a, c, g, inosine, u, deoxyadenosine, deoxyguanosine, deoxycytidine, deoxyinosine, thymine, ribonebularine, 2'-O-methylnebularine, or 2'-deoxynebularine
  misc_difference 102: note = a, c, g, inosine, u, deoxyadenosine, deoxyguanosine, deoxycytidine, deoxyinosine, thymine, ribonebularine, 2'-O-methylnebularine, or 2'-deoxynebularine
  misc_difference 103: note = a, c, g, inosine, u, deoxyadenosine, deoxyguanosine, deoxycytidine, deoxyinosine, thymine, ribonebularine, 2'-O-methylnebularine, or 2'-deoxynebularine

SEQ ID NO: 2988 - RNA, 103 nt, synthetic construct; identical to SEQ ID NO: 1797
  source 1..103: mol_type = other RNA
  modified_base 1: mod_base = OTHER; note = 2'-O-Methyl-cytidine phosphorothioate
  modified_base 2: mod_base = OTHER; note = 2'-O-Methyl-adenosine phosphorothioate
  modified_base 3: mod_base = OTHER; note = 2'-O-Methyl-guanosine phosphorothioate
  modified_base 21: mod_base = OTHER; note = 2'-O-Methyl-guanosine
  modified_base 28: mod_base = OTHER; note = 2'-O-Methyl-adenosine
  modified_base 29: mod_base = OTHER; note = 2'-O-Methyl-guanosine
  modified_base 30: mod_base = OTHER; note = 2'-O-Methyl-cytidine
  modified_base 31: mod_base = OTHER; note = 2'-O-Methyl-uridine
  modified_base 32: mod_base = OTHER; note = 2'-O-Methyl-adenosine
  modified_base 34: mod_base = OTHER; note = 2'-O-Methyl-adenosine
  modified_base 35: mod_base = OTHER; note = 2'-O-Methyl-adenosine
  modified_base 36: mod_base = OTHER; note = 2'-O-Methyl-adenosine
  modified_base 37: mod_base = OTHER; note = 2'-O-Methyl-uridine
  modified_base 38: mod_base = OTHER; note = 2'-O-Methyl-adenosine
  modified_base 39: mod_base = OTHER; note = 2'-O-Methyl-guanosine
  modified_base 40: mod_base = OTHER; note = 2'-O-Methyl-cytidine
  modified_base 41: mod_base = OTHER; note = 2'-O-Methyl-adenosine
  modified_base 42: mod_base = OTHER; note = 2'-O-Methyl-adenosine
  modified_base 45: mod_base = OTHER; note = uridine phosphorothioate
  modified_base 46: mod_base = OTHER; note = 2'-O-Methyl-adenosine
  modified_base 48: mod_base = OTHER; note = 2'-O-Methyl-adenosine
  modified_base 50: mod_base = OTHER; note = 2'-O-Methyl-uridine
  modified_base 52: mod_base = OTHER; note = 2'-O-Methyl-adenosine
  modified_base 53: mod_base = OTHER; note = 2'-O-Methyl-guanosine
  modified_base 54: mod_base = OTHER; note = 2'-O-Methyl-guanosine
  modified_base 55: mod_base = OTHER; note = 2'-O-Methyl-cytidine
  modified_base 56: mod_base = OTHER; note = 2'-O-Methyl-uridine
  modified_base 57: mod_base = OTHER; note = 2'-O-Methyl-adenosine
  modified_base 60: mod_base = OTHER; note = 2'-O-Methyl-cytidine
  modified_base 61: mod_base = OTHER; note = 2'-O-Methyl-cytidine
  modified_base 64: mod_base = OTHER; note = uridine phosphorothioate
  modified_base 66: mod_base = OTHER; note = 2'-O-Methyl-uridine
  modified_base 67: mod_base = OTHER; note = 2'-O-Methyl-cytidine
  modified_base 70: mod_base = OTHER; note = 2'-O-Methyl-cytidine
  modified_base 71: mod_base = OTHER; note = 2'-O-Methyl-uridine
  modified_base 72: mod_base = OTHER; note = 2'-O-Methyl-uridine
  modified_base 74: mod_base = OTHER; note = 2'-O-Methyl-adenosine
  modified_base 75: mod_base = OTHER; note = 2'-O-Methyl-adenosine
  modified_base 76: mod_base = OTHER; note = 2'-O-Methyl-adenosine
  modified_base 77: mod_base = OTHER; note = 2'-O-Methyl-adenosine
  modified_base 78: mod_base = OTHER; note = 2'-O-Methyl-adenosine
  modified_base 79: mod_base = OTHER; note = 2'-O-Methyl-guanosine
  modified_base 80: mod_base = OTHER; note = 2'-O-Methyl-uridine
  modified_base 82: mod_base = OTHER; note = 2'-O-Methyl-guanosine
  modified_base 83: mod_base = OTHER; note = 2'-O-Methyl-cytidine
  modified_base 84: mod_base = OTHER; note = 2'-O-Methyl-adenosine
  modified_base 85: mod_base = OTHER; note = 2'-O-Methyl-cytidine
  modified_base 86: mod_base = OTHER; note = 2'-O-Methyl-cytidine
  modified_base 87: mod_base = OTHER; note = 2'-O-Methyl-guanosine
  modified_base 89: mod_base = OTHER; note = 2'-O-Methyl-guanosine
  modified_base 92: mod_base = OTHER; note = 2'-O-Methyl-guanosine
  modified_base 93: mod_base = OTHER; note = 2'-O-Methyl-guanosine
  modified_base 94: mod_base = OTHER; note = 2'-O-Methyl-uridine
  modified_base 95: mod_base = OTHER; note = 2'-O-Methyl-guanosine
  modified_base 96: mod_base = OTHER; note = 2'-O-Methyl-cytidine
  modified_base 97: mod_base = OTHER; note = 2'-O-Methyl-uridine
  modified_base 98: mod_base = OTHER; note = 2'-O-Methyl-uridine phosphorothioate
  modified_base 99: mod_base = OTHER; note = 2'-O-Methyl-uridine phosphorothioate
  modified_base 100: mod_base = OTHER; note = 2'-O-Methyl-uridine
  misc_difference 101: note = a, c, g, inosine, u, deoxyadenosine, deoxyguanosine, deoxycytidine, deoxyinosine, thymine, ribonebularine, 2'-O-methylnebularine, or 2'-deoxynebularine
  misc_difference 102: note = a, c, g, inosine, u, deoxyadenosine, deoxyguanosine, deoxycytidine, deoxyinosine, thymine, ribonebularine, 2'-O-methylnebularine, or 2'-deoxynebularine
  misc_difference 103: note = a, c, g, inosine, u, deoxyadenosine, deoxyguanosine, deoxycytidine, deoxyinosine, thymine, ribonebularine, 2'-O-methylnebularine, or 2'-deoxynebularine

SEQ ID NO: 2989 - RNA, 103 nt, synthetic construct; identical to SEQ ID NO: 1795
  source 1..103: mol_type = other RNA
  modified_base 1: mod_base = OTHER; note = 2'-O-Methyl-cytidine phosphorothioate
  modified_base 2: mod_base = OTHER; note = 2'-O-Methyl-cytidine phosphorothioate
  modified_base 3: mod_base = OTHER; note = 2'-O-Methyl-cytidine phosphorothioate
  modified_base 21: mod_base = OTHER; note = 2'-O-Methyl-guanosine
  modified_base 25: mod_base = OTHER; note = uridine phosphorothioate
  modified_base 28: mod_base = OTHER; note = 2'-O-Methyl-adenosine
  modified_base 29: mod_base = OTHER; note = 2'-O-Methyl-guanosine
  modified_base 30: mod_base = OTHER; note = 2'-O-Methyl-cytidine
  modified_base 31: mod_base = OTHER; note = 2'-O-Methyl-uridine
  modified_base 32: mod_base = OTHER; note = 2'-O-Methyl-adenosine
  modified_base 33: mod_base = OTHER; note = 2'-O-Methyl-guanosine
  modified_base 34: mod_base = OTHER; note = 2'-O-Methyl-adenosine
  modified_base 35: mod_base = OTHER; note = 2'-O-Methyl-adenosine
  modified_base 36: mod_base = OTHER; note = 2'-O-Methyl-adenosine
  modified_base 37: mod_base = OTHER; note = 2'-O-Methyl-uridine
  modified_base 38: mod_base = OTHER; note = 2'-O-Methyl-adenosine
  modified_base 39: mod_base = OTHER; note = 2'-O-Methyl-guanosine
  modified_base 40: mod_base = OTHER; note = 2'-O-Methyl-cytidine
  modified_base 41: mod_base = OTHER; note = 2'-O-Methyl-adenosine
  modified_base 42: mod_base = OTHER; note = 2'-O-Methyl-adenosine
  modified_base 45: mod_base = OTHER; note = uridine phosphorothioate
  modified_base 46: mod_base = OTHER; note = 2'-O-Methyl-adenosine
  modified_base 48: mod_base = OTHER; note = 2'-O-Methyl-adenosine
  modified_base 50: mod_base = OTHER; note = 2'-O-Methyl-uridine
  modified_base 52: mod_base = OTHER; note = 2'-O-Methyl-adenosine
  modified_base 53: mod_base = OTHER; note = 2'-O-Methyl-guanosine
  modified_base 54: mod_base = OTHER; note = 2'-O-Methyl-guanosine
  modified_base 55: mod_base = OTHER; note = 2'-O-Methyl-cytidine
  modified_base 56: mod_base = OTHER; note = 2'-O-Methyl-uridine
  modified_base 57: mod_base = OTHER; note = 2'-O-Methyl-adenosine
  modified_base 60: mod_base = OTHER; note = 2'-O-Methyl-cytidine
  modified_base 61: mod_base = OTHER; note = 2'-O-Methyl-cytidine
  modified_base 66: mod_base = OTHER; note = 2'-O-Methyl-uridine
  modified_base 67: mod_base = OTHER; note = 2'-O-Methyl-cytidine
  modified_base 70: mod_base = OTHER; note = 2'-O-Methyl-cytidine
  modified_base 71: mod_base = OTHER; note = 2'-O-Methyl-uridine
  modified_base 72: mod_base = OTHER; note = 2'-O-Methyl-uridine
  modified_base 73: mod_base = OTHER; note = 2'-O-Methyl-guanosine
  modified_base 74: mod_base = OTHER; note = 2'-O-Methyl-adenosine
  modified_base 75: mod_base = OTHER; note = 2'-O-Methyl-adenosine
  modified_base 76: mod_base = OTHER; note = 2'-O-Methyl-adenosine
  modified_base 77: mod_base = OTHER; note = 2'-O-Methyl-adenosine
  modified_base 78: mod_base = OTHER; note = 2'-O-Methyl-adenosine
  modified_base 79: mod_base = OTHER; note = 2'-O-Methyl-guanosine
  modified_base 80: mod_base = OTHER; note = 2'-O-Methyl-uridine
  modified_base 81: mod_base = OTHER; note = 2'-O-Methyl-guanosine
  modified_base 83: mod_base = OTHER; note = 2'-O-Methyl-cytidine
  modified_base 84: mod_base = OTHER; note = 2'-O-Methyl-adenosine
  modified_base 85: mod_base = OTHER; note = 2'-O-Methyl-cytidine
  modified_base 86: mod_base = OTHER; note = 2'-O-Methyl-cytidine
  modified_base 87: mod_base = OTHER; note = 2'-O-Methyl-guanosine
  modified_base 88: mod_base = OTHER; note = 2'-O-Methyl-adenosine
  modified_base 89: mod_base = OTHER; note = 2'-O-Methyl-guanosine
  modified_base 90: mod_base = OTHER; note = 2'-O-Methyl-uridine
  modified_base 91: mod_base = OTHER; note = 2'-O-Methyl-cytidine
  modified_base 92: mod_base = OTHER; note = 2'-O-Methyl-guanosine
  modified_base 93: mod_base = OTHER; note = 2'-O-Methyl-guanosine
  modified_base 94: mod_base = OTHER; note = 2'-O-Methyl-uridine
  modified_base 95: mod_base = OTHER; note = 2'-O-Methyl-guanosine
  modified_base 96: mod_base = OTHER; note = 2'-O-Methyl-cytidine
  modified_base 97: mod_base = OTHER; note = 2'-O-Methyl-uridine
  modified_base 98: mod_base = OTHER; note = 2'-O-Methyl-uridine phosphorothioate
  modified_base 99: mod_base = OTHER; note = 2'-O-Methyl-uridine phosphorothioate
  modified_base 100: mod_base = OTHER; note = 2'-O-Methyl-uridine
  misc_difference 101: note = a, c, g, inosine, u, deoxyadenosine, deoxyguanosine, deoxycytidine, deoxyinosine, thymine, ribonebularine, 2'-O-methylnebularine, or 2'-deoxynebularine
  misc_difference 102: note = a, c, g, inosine, u, deoxyadenosine, deoxyguanosine, deoxycytidine, deoxyinosine, thymine, ribonebularine, 2'-O-methylnebularine, or 2'-deoxynebularine
  misc_difference 103: note = a, c, g, inosine, u, deoxyadenosine, deoxyguanosine, deoxycytidine, deoxyinosine, thymine, ribonebularine, 2'-O-methylnebularine, or 2'-deoxynebularine

SEQ ID NO: 2990 - RNA, 103 nt, synthetic construct; identical to SEQ ID NO: 1795
  source 1..103: mol_type = other RNA
  modified_base 1: mod_base = OTHER; note = 2'-O-Methyl-cytidine phosphorothioate
  modified_base 2: mod_base = OTHER; note = 2'-O-Methyl-cytidine phosphorothioate
  modified_base 3: mod_base = OTHER; note = 2'-O-Methyl-cytidine phosphorothioate
  modified_base 21: mod_base = OTHER; note = 2'-O-Methyl-guanosine
  modified_base 25: mod_base = OTHER; note = uridine phosphorothioate
  modified_base 28: mod_base = OTHER; note = 2'-O-Methyl-adenosine
  modified_base 29: mod_base = OTHER; note = 2'-O-Methyl-guanosine
  modified_base 30: mod_base = OTHER; note = 2'-O-Methyl-cytidine
  modified_base 31: mod_base = OTHER; note = 2'-O-Methyl-uridine
  modified_base 32: mod_base = OTHER; note = 2'-O-Methyl-adenosine
  modified_base 34: mod_base = OTHER; note = 2'-O-Methyl-adenosine
  modified_base 35: mod_base = OTHER; note = 2'-O-Methyl-adenosine
  modified_base 36: mod_base = OTHER; note = 2'-O-Methyl-adenosine
  modified_base 37: mod_base = OTHER; note = 2'-O-Methyl-uridine
  modified_base 38: mod_base = OTHER; note = 2'-O-Methyl-adenosine
  modified_base 39: mod_base = OTHER; note = 2'-O-Methyl-guanosine
  modified_base 40: mod_base = OTHER; note = 2'-O-Methyl-cytidine
  modified_base 41: mod_base = OTHER; note = 2'-O-Methyl-adenosine
  modified_base 42: mod_base = OTHER; note = 2'-O-Methyl-adenosine
  modified_base 45: mod_base = OTHER; note = uridine phosphorothioate
  modified_base 46: mod_base = OTHER; note = 2'-O-Methyl-adenosine
  modified_base 48: mod_base = OTHER; note = 2'-O-Methyl-adenosine
  modified_base 50: mod_base = OTHER; note = 2'-O-Methyl-uridine
  modified_base 52: mod_base = OTHER; note = 2'-O-Methyl-adenosine
  modified_base 53: mod_base = OTHER; note = 2'-O-Methyl-guanosine
  modified_base 54: mod_base = OTHER; note = 2'-O-Methyl-guanosine
  modified_base 55: mod_base = OTHER; note = 2'-O-Methyl-cytidine
  modified_base 56: mod_base = OTHER; note = 2'-O-Methyl-uridine
  modified_base 57: mod_base = OTHER; note = 2'-O-Methyl-adenosine
  modified_base 60: mod_base = OTHER; note = 2'-O-Methyl-cytidine
  modified_base 61: mod_base = OTHER; note = 2'-O-Methyl-cytidine
  modified_base 66: mod_base = OTHER; note = 2'-O-Methyl-uridine
  modified_base 67: mod_base = OTHER; note = 2'-O-Methyl-cytidine
  modified_base 70: mod_base = OTHER; note = 2'-O-Methyl-cytidine
  modified_base 71: mod_base = OTHER; note = 2'-O-Methyl-uridine
  modified_base 72: mod_base = OTHER; note = 2'-O-Methyl-uridine
  modified_base 74: mod_base = OTHER; note = 2'-O-Methyl-adenosine
  modified_base 75: mod_base = OTHER; note = 2'-O-Methyl-adenosine
  modified_base 76: mod_base = OTHER; note = 2'-O-Methyl-adenosine
  modified_base 77: mod_base = OTHER; note = 2'-O-Methyl-adenosine
  modified_base 78: mod_base = OTHER; note = 2'-O-Methyl-adenosine
  modified_base 79: mod_base = OTHER; note = 2'-O-Methyl-guanosine
  modified_base 80: mod_base = OTHER; note = 2'-O-Methyl-uridine
  modified_base 81: mod_base = OTHER; note = 2'-O-Methyl-guanosine
  modified_base 83: mod_base = OTHER; note = 2'-O-Methyl-cytidine
  modified_base 84: mod_base = OTHER; note = 2'-O-Methyl-adenosine
  modified_base 85: mod_base = OTHER; note = 2'-O-Methyl-cytidine
  modified_base 86: mod_base = OTHER; note = 2'-O-Methyl-cytidine
  modified_base 87: mod_base = OTHER; note = 2'-O-Methyl-guanosine
  modified_base 88: mod_base = OTHER; note = 2'-O-Methyl-adenosine
  modified_base 89: mod_base = OTHER; note = 2'-O-Methyl-guanosine
  modified_base 90: mod_base = OTHER; note = 2'-O-Methyl-uridine
  modified_base 91: mod_base = OTHER; note = 2'-O-Methyl-cytidine
  modified_base 92: mod_base = OTHER; note = 2'-O-Methyl-guanosine
  modified_base 93: mod_base = OTHER; note = 2'-O-Methyl-guanosine
  modified_base 94: mod_base = OTHER; note = 2'-O-Methyl-uridine
  modified_base 95: mod_base = OTHER; note = 2'-O-Methyl-guanosine
  modified_base 96: mod_base = OTHER; note = 2'-O-Methyl-cytidine
  modified_base 97: mod_base = OTHER; note = 2'-O-Methyl-uridine
  modified_base 98: mod_base = OTHER; note = 2'-O-Methyl-uridine phosphorothioate
  modified_base 99: mod_base = OTHER; note = 2'-O-Methyl-uridine phosphorothioate
  modified_base 100: mod_base = OTHER; note = 2'-O-Methyl-uridine
  misc_difference 101: note = a, c, g, inosine, u, deoxyadenosine, deoxyguanosine, deoxycytidine, deoxyinosine, thymine, ribonebularine, 2'-O-methylnebularine, or 2'-deoxynebularine
  misc_difference 102: note = a, c, g, inosine, u, deoxyadenosine, deoxyguanosine, deoxycytidine, deoxyinosine, thymine, ribonebularine, 2'-O-methylnebularine, or 2'-deoxynebularine
  misc_difference 103: note = a, c, g, inosine, u, deoxyadenosine, deoxyguanosine, deoxycytidine, deoxyinosine, thymine, ribonebularine, 2'-O-methylnebularine, or 2'-deoxynebularine

SEQ ID NO: 2991 - RNA, 103 nt, synthetic construct; identical to SEQ ID NO: 1796
  source 1..103: mol_type = other RNA
  modified_base 1: mod_base = OTHER; note = 2'-O-Methyl-guanosine phosphorothioate
  modified_base 2: mod_base = OTHER; note = 2'-O-Methyl-adenosine phosphorothioate
  modified_base 3: mod_base = OTHER; note = 2'-O-Methyl-guanosine phosphorothioate
  modified_base 21: mod_base = OTHER; note = 2'-O-Methyl-guanosine
  modified_base 25: mod_base = OTHER; note = uridine phosphorothioate
  modified_base 28: mod_base = OTHER; note = 2'-O-Methyl-adenosine
  modified_base 29: mod_base = OTHER; note = 2'-O-Methyl-guanosine
  modified_base 30: mod_base = OTHER; note = 2'-O-Methyl-cytidine
  modified_base 31: mod_base = OTHER; note = 2'-O-Methyl-uridine
  modified_base 32: mod_base = OTHER; note = 2'-O-Methyl-adenosine
  modified_base 33: mod_base = OTHER; note = 2'-O-Methyl-guanosine
  modified_base 34: mod_base = OTHER; note = 2'-O-Methyl-adenosine
  modified_base 35: mod_base = OTHER; note = 2'-O-Methyl-adenosine
  modified_base 36: mod_base = OTHER; note = 2'-O-Methyl-adenosine
  modified_base 37: mod_base = OTHER; note = 2'-O-Methyl-uridine
  modified_base 38: mod_base = OTHER; note = 2'-O-Methyl-adenosine
  modified_base 39: mod_base = OTHER; note = 2'-O-Methyl-guanosine
  modified_base 40: mod_base = OTHER; note = 2'-O-Methyl-cytidine
  modified_base 41: mod_base = OTHER; note = 2'-O-Methyl-adenosine
  modified_base 42: mod_base = OTHER; note = 2'-O-Methyl-adenosine
  modified_base 45: mod_base = OTHER; note = uridine phosphorothioate
  modified_base 46: mod_base = OTHER; note = 2'-O-Methyl-adenosine
  modified_base 48: mod_base = OTHER; note = 2'-O-Methyl-adenosine
  modified_base 50: mod_base = OTHER; note = 2'-O-Methyl-uridine
  modified_base 52: mod_base = OTHER; note = 2'-O-Methyl-adenosine
  modified_base 53: mod_base = OTHER; note = 2'-O-Methyl-guanosine
  modified_base 54: mod_base = OTHER; note = 2'-O-Methyl-guanosine
  modified_base 55: mod_base = OTHER; note = 2'-O-Methyl-cytidine
  modified_base 56: mod_base = OTHER; note = 2'-O-Methyl-uridine
  modified_base 57: mod_base = OTHER; note = 2'-O-Methyl-adenosine
  modified_base 60: mod_base = OTHER; note = 2'-O-Methyl-cytidine
  modified_base 61: mod_base = OTHER; note = 2'-O-Methyl-cytidine
  modified_base 66: mod_base = OTHER; note = 2'-O-Methyl-uridine
  modified_base 67: mod_base = OTHER; note = 2'-O-Methyl-cytidine
  modified_base 70: mod_base = OTHER; note = 2'-O-Methyl-cytidine
  modified_base 71: mod_base = OTHER; note = 2'-O-Methyl-uridine
  modified_base 72: mod_base = OTHER; note = 2'-O-Methyl-uridine
  modified_base 73: mod_base = OTHER; note = 2'-O-Methyl-guanosine
  modified_base 74: mod_base = OTHER; note = 2'-O-Methyl-adenosine
  modified_base 75: mod_base = OTHER; note = 2'-O-Methyl-adenosine
  modified_base 76: mod_base = OTHER; note = 2'-O-Methyl-adenosine
  modified_base 77: mod_base = OTHER; note = 2'-O-Methyl-adenosine
  modified_base 78: mod_base = OTHER; note = 2'-O-Methyl-adenosine
  modified_base 79: mod_base = OTHER; note = 2'-O-Methyl-guanosine
  modified_base 80: mod_base = OTHER; note = 2'-O-Methyl-uridine
  modified_base 81: mod_base = OTHER; note = 2'-O-Methyl-guanosine
  modified_base 83: mod_base = OTHER; note = 2'-O-Methyl-cytidine
  modified_base 84: mod_base = OTHER; note = 2'-O-Methyl-adenosine
  modified_base 85: mod_base = OTHER; note = 2'-O-Methyl-cytidine
  modified_base 86: mod_base = OTHER; note = 2'-O-Methyl-cytidine
  modified_base 87: mod_base = OTHER; note = 2'-O-Methyl-guanosine
  modified_base 88: mod_base = OTHER; note = 2'-O-Methyl-adenosine
  modified_base 89: mod_base = OTHER; note = 2'-O-Methyl-guanosine
  modified_base 90: mod_base = OTHER; note = 2'-O-Methyl-uridine
  modified_base 91: mod_base = OTHER; note = 2'-O-Methyl-cytidine
  modified_base 92: mod_base = OTHER; note = 2'-O-Methyl-guanosine
  modified_base 93: mod_base = OTHER; note = 2'-O-Methyl-guanosine
  modified_base 94: mod_base = OTHER; note = 2'-O-Methyl-uridine
  modified_base 95: mod_base = OTHER; note = 2'-O-Methyl-guanosine
  modified_base 96: mod_base = OTHER; note = 2'-O-Methyl-cytidine
  modified_base 97: mod_base = OTHER; note = 2'-O-Methyl-uridine
  modified_base 98: mod_base = OTHER; note = 2'-O-Methyl-uridine phosphorothioate
  modified_base 99: mod_base = OTHER; note = 2'-O-Methyl-uridine phosphorothioate
  modified_base 100: mod_base = OTHER; note = 2'-O-Methyl-uridine
  misc_difference 101: note = a, c, g, inosine, u, deoxyadenosine, deoxyguanosine, deoxycytidine, deoxyinosine, thymine, ribonebularine, 2'-O-methylnebularine, or 2'-deoxynebularine
  misc_difference 102: note = a, c, g, inosine, u, deoxyadenosine, deoxyguanosine, deoxycytidine, deoxyinosine, thymine, ribonebularine, 2'-O-methylnebularine, or 2'-deoxynebularine
  misc_difference 103: note = a, c, g, inosine, u, deoxyadenosine, deoxyguanosine, deoxycytidine, deoxyinosine, thymine, ribonebularine, 2'-O-methylnebularine, or 2'-deoxynebularine

SEQ ID NO: 2992 - RNA, 103 nt, synthetic construct; identical to SEQ ID NO: 1796
  source 1..103: mol_type = other RNA
  modified_base 1: mod_base = OTHER; note = 2'-O-Methyl-guanosine phosphorothioate
  modified_base 2: mod_base = OTHER; note = 2'-O-Methyl-adenosine phosphorothioate
  modified_base 3: mod_base = OTHER; note = 2'-O-Methyl-guanosine phosphorothioate
  modified_base 21: mod_base = OTHER; note = 2'-O-Methyl-guanosine
  modified_base 25: mod_base = OTHER; note = uridine phosphorothioate
  modified_base 28: mod_base = OTHER; note = 2'-O-Methyl-adenosine
  modified_base 29: mod_base = OTHER; note = 2'-O-Methyl-guanosine
  modified_base 30: mod_base = OTHER; note = 2'-O-Methyl-cytidine
  modified_base 31: mod_base = OTHER; note = 2'-O-Methyl-uridine
  modified_base 32: mod_base = OTHER; note = 2'-O-Methyl-adenosine
  modified_base 34: mod_base = OTHER; note = 2'-O-Methyl-adenosine
  modified_base 35: mod_base = OTHER; note = 2'-O-Methyl-adenosine
  modified_base 36: mod_base = OTHER; note = 2'-O-Methyl-adenosine
  modified_base 37: mod_base = OTHER; note = 2'-O-Methyl-uridine
  modified_base 38: mod_base = OTHER; note = 2'-O-Methyl-adenosine
  modified_base 39: mod_base = OTHER; note = 2'-O-Methyl-guanosine
  modified_base 40: mod_base = OTHER; note = 2'-O-Methyl-cytidine
  modified_base 41: mod_base = OTHER; note = 2'-O-Methyl-adenosine
  modified_base 42: mod_base = OTHER; note = 2'-O-Methyl-adenosine
  modified_base 45: mod_base = OTHER; note = uridine phosphorothioate
  modified_base 46: mod_base = OTHER; note = 2'-O-Methyl-adenosine
  modified_base 48: mod_base = OTHER; note = 2'-O-Methyl-adenosine
  modified_base 50: mod_base = OTHER; note = 2'-O-Methyl-uridine
  modified_base 52: mod_base = OTHER; note = 2'-O-Methyl-adenosine
  modified_base 53: mod_base = OTHER; note = 2'-O-Methyl-guanosine
  modified_base 54: mod_base = OTHER; note = 2'-O-Methyl-guanosine
  modified_base 55: mod_base = OTHER; note = 2'-O-Methyl-cytidine
  modified_base 56: mod_base = OTHER; note = 2'-O-Methyl-uridine
  modified_base 57: mod_base = OTHER; note = 2'-O-Methyl-adenosine
  modified_base 60: mod_base = OTHER; note = 2'-O-Methyl-cytidine
  modified_base 61: mod_base = OTHER; note = 2'-O-Methyl-cytidine
  modified_base 66: mod_base = OTHER; note = 2'-O-Methyl-uridine
  modified_base 67: mod_base = OTHER; note = 2'-O-Methyl-cytidine
  modified_base 70: mod_base = OTHER; note = 2'-O-Methyl-cytidine
  modified_base 71: mod_base = OTHER; note = 2'-O-Methyl-uridine
  modified_base 72: mod_base = OTHER; note = 2'-O-Methyl-uridine
  modified_base 74: mod_base = OTHER; note = 2'-O-Methyl-adenosine
  modified_base 75: mod_base = OTHER; note = 2'-O-Methyl-adenosine
  modified_base 76: mod_base = OTHER; note = 2'-O-Methyl-adenosine
  modified_base 77: mod_base = OTHER; note = 2'-O-Methyl-adenosine
  modified_base 78: mod_base = OTHER; note = 2'-O-Methyl-adenosine
  modified_base 79: mod_base = OTHER; note = 2'-O-Methyl-guanosine
  modified_base 80: mod_base = OTHER; note = 2'-O-Methyl-uridine
  modified_base 81: mod_base = OTHER; note = 2'-O-Methyl-guanosine
  modified_base 83: mod_base = OTHER; note = 2'-O-Methyl-cytidine
  modified_base 84: mod_base = OTHER; note = 2'-O-Methyl-adenosine
  modified_base 85: mod_base = OTHER; note = 2'-O-Methyl-cytidine
  modified_base 86: mod_base = OTHER; note = 2'-O-Methyl-cytidine
  modified_base 87: mod_base = OTHER; note = 2'-O-Methyl-guanosine
  modified_base 88: mod_base = OTHER; note = 2'-O-Methyl-adenosine
  modified_base 89: mod_base = OTHER; note = 2'-O-Methyl-guanosine
  modified_base 90: mod_base = OTHER; note = 2'-O-Methyl-uridine
  modified_base 91: mod_base = OTHER; note = 2'-O-Methyl-cytidine
  modified_base 92: mod_base = OTHER; note = 2'-O-Methyl-guanosine
  modified_base 93: mod_base = OTHER; note = 2'-O-Methyl-guanosine
  modified_base 94: mod_base = OTHER; note = 2'-O-Methyl-uridine
  modified_base 95: mod_base = OTHER; note = 2'-O-Methyl-guanosine
  modified_base 96: mod_base = OTHER; note = 2'-O-Methyl-cytidine
  modified_base 97: mod_base = OTHER; note = 2'-O-Methyl-uridine
  modified_base 98: mod_base = OTHER; note = 2'-O-Methyl-uridine phosphorothioate
  modified_base 99: mod_base = OTHER; note = 2'-O-Methyl-uridine phosphorothioate
  modified_base 100: mod_base = OTHER; note = 2'-O-Methyl-uridine
  misc_difference 101: note = a, c, g, inosine, u, deoxyadenosine, deoxyguanosine, deoxycytidine, deoxyinosine, thymine, ribonebularine, 2'-O-methylnebularine, or 2'-deoxynebularine
  misc_difference 102: note = a, c, g, inosine, u, deoxyadenosine, deoxyguanosine, deoxycytidine, deoxyinosine, thymine, ribonebularine, 2'-O-methylnebularine, or 2'-deoxynebularine
  misc_difference 103: note = a, c, g, inosine, u, deoxyadenosine, deoxyguanosine, deoxycytidine, deoxyinosine, thymine, ribonebularine, 2'-O-methylnebularine, or 2'-deoxynebularine

SEQ ID NO: 2993 - RNA, 103 nt, synthetic construct; identical to SEQ ID NO: 1797
  source 1..103: mol_type = other RNA
  modified_base 1: mod_base = OTHER; note = 2'-O-Methyl-cytidine phosphorothioate
  modified_base 2: mod_base = OTHER; note = 2'-O-Methyl-adenosine phosphorothioate
  modified_base 3: mod_base = OTHER; note = 2'-O-Methyl-guanosine phosphorothioate
  modified_base 21: mod_base = OTHER; note = 2'-O-Methyl-guanosine
  modified_base 25: mod_base = OTHER; note = uridine phosphorothioate
  modified_base 28: mod_base = OTHER; note = 2'-O-Methyl-adenosine
  modified_base 29: mod_base = OTHER; note = 2'-O-Methyl-guanosine
  modified_base 30: mod_base = OTHER; note = 2'-O-Methyl-cytidine
  modified_base 31: mod_base = OTHER; note = 2'-O-Methyl-uridine
  modified_base 32: mod_base = OTHER; note = 2'-O-Methyl-adenosine
  modified_base 33: mod_base = OTHER; note = 2'-O-Methyl-guanosine
  modified_base 34: mod_base = OTHER; note = 2'-O-Methyl-adenosine
  modified_base 35: mod_base = OTHER; note = 2'-O-Methyl-adenosine
  modified_base 36: mod_base = OTHER; note = 2'-O-Methyl-adenosine
  modified_base 37: mod_base = OTHER; note = 2'-O-Methyl-uridine
  modified_base 38: mod_base = OTHER; note = 2'-O-Methyl-adenosine
  modified_base 39: mod_base = OTHER; note = 2'-O-Methyl-guanosine
  modified_base 40: mod_base = OTHER; note = 2'-O-Methyl-cytidine
  modified_base 41: mod_base = OTHER; note = 2'-O-Methyl-adenosine
  modified_base 42: mod_base = OTHER; note = 2'-O-Methyl-adenosine
  modified_base 45: mod_base = OTHER; note = uridine phosphorothioate
  modified_base 46: mod_base = OTHER; note = 2'-O-Methyl-adenosine
  modified_base 48: mod_base = OTHER; note = 2'-O-Methyl-adenosine
  modified_base 50: mod_base = OTHER; note = 2'-O-Methyl-uridine
  modified_base 52: mod_base = OTHER; note = 2'-O-Methyl-adenosine
  modified_base 53: mod_base = OTHER; note = 2'-O-Methyl-guanosine
  modified_base 54: mod_base = OTHER; note = 2'-O-Methyl-guanosine
  modified_base 57: mod_base = OTHER; note = 2'-O-Methyl-adenosine
  modified_base 61: mod_base = OTHER; note = 2'-O-Methyl-cytidine
  modified_base 66: mod_base = OTHER; note = 2'-O-Methyl-uridine
  modified_base 67: mod_base = OTHER; note = 2'-O-Methyl-cytidine
  modified_base 70: mod_base = OTHER; note = 2'-O-Methyl-cytidine
  modified_base 71: mod_base = OTHER; note = 2'-O-Methyl-uridine
  modified_base 72: mod_base = OTHER; note = 2'-O-Methyl-uridine
  modified_base 74: mod_base = OTHER; note = 2'-O-Methyl-adenosine
  modified_base 75: mod_base = OTHER; note = 2'-O-Methyl-adenosine
  modified_base 76: mod_base = OTHER; note = 2'-O-Methyl-adenosine
  modified_base 77: mod_base = OTHER; note = 2'-O-Methyl-adenosine
  modified_base 78: mod_base = OTHER; note = 2'-O-Methyl-adenosine
  modified_base 79: mod_base = OTHER; note = 2'-O-Methyl-guanosine
  modified_base 80: mod_base = OTHER; note = 2'-O-Methyl-uridine
  modified_base 82: mod_base = OTHER; note = 2'-O-Methyl-guanosine
  modified_base 83: mod_base = OTHER; note = 2'-O-Methyl-cytidine
  modified_base 84: mod_base = OTHER; note = 2'-O-Methyl-adenosine
  modified_base 85: mod_base = OTHER; note = 2'-O-Methyl-cytidine
  modified_base 86: mod_base = OTHER; note = 2'-O-Methyl-cytidine
  modified_base 87: mod_base = OTHER; note = 2'-O-Methyl-guanosine
  modified_base 89: mod_base = OTHER; note = 2'-O-Methyl-guanosine
  modified_base 92: mod_base = OTHER; note = 2'-O-Methyl-guanosine
  modified_base 93: mod_base = OTHER; note = 2'-O-Methyl-guanosine
  modified_base 94: mod_base = OTHER; note = 2'-O-Methyl-uridine
  modified_base 95: mod_base = OTHER; note = 2'-O-Methyl-guanosine
  modified_base 96: mod_base = OTHER; note = 2'-O-Methyl-cytidine
  modified_base 97: mod_base = OTHER; note = 2'-O-Methyl-uridine
  modified_base 98: mod_base = OTHER; note = 2'-O-Methyl-uridine phosphorothioate
  modified_base 99: mod_base = OTHER; note = 2'-O-Methyl-uridine phosphorothioate
  modified_base 100: mod_base = OTHER; note = 2'-O-Methyl-uridine
  misc_difference 101: note = a, c, g, inosine, u, deoxyadenosine, deoxyguanosine, deoxycytidine, deoxyinosine, thymine, ribonebularine, 2'-O-methylnebularine, or 2'-deoxynebularine
  misc_difference 102: note = a, c, g, inosine, u, deoxyadenosine, deoxyguanosine, deoxycytidine, deoxyinosine, thymine, ribonebularine, 2'-O-methylnebularine, or 2'-deoxynebularine
  misc_difference 103: note = a, c, g, inosine, u, deoxyadenosine, deoxyguanosine, deoxycytidine, deoxyinosine, thymine, ribonebularine, 2'-O-methylnebularine, or 2'-deoxynebularine

SEQ ID NO: 2994 - RNA, 103 nt, synthetic construct; identical to SEQ ID NO: 1797
  source 1..103: mol_type = other RNA
  modified_base 1: mod_base = OTHER; note = 2'-O-Methyl-cytidine phosphorothioate
  modified_base 2: mod_base = OTHER; note = 2'-O-Methyl-adenosine phosphorothioate
  modified_base 3: mod_base = OTHER; note = 2'-O-Methyl-guanosine phosphorothioate
  modified_base 21: mod_base = OTHER; note = 2'-O-Methyl-guanosine
  modified_base 25: mod_base = OTHER; note = uridine phosphorothioate
  modified_base 28: mod_base = OTHER; note = 2'-O-Methyl-adenosine
  modified_base 29: mod_base = OTHER; note = 2'-O-Methyl-guanosine
  modified_base 30: mod_base = OTHER; note = 2'-O-Methyl-cytidine
  modified_base 31: mod_base = OTHER; note = 2'-O-Methyl-uridine
  modified_base 32: mod_base = OTHER; note = 2'-O-Methyl-adenosine
  modified_base 33: mod_base = OTHER; note = 2'-O-Methyl-guanosine
  modified_base 34: mod_base = OTHER; note = 2'-O-Methyl-adenosine
  modified_base 35: mod_base = OTHER; note = 2'-O-Methyl-adenosine
  modified_base 36: mod_base = OTHER; note = 2'-O-Methyl-adenosine
  modified_base 37: mod_base = OTHER; note = 2'-O-Methyl-uridine
  modified_base 38: mod_base = OTHER; note = 2'-O-Methyl-adenosine
  modified_base 39: mod_base = OTHER; note = 2'-O-Methyl-guanosine
  modified_base 40: mod_base = OTHER; note = 2'-O-Methyl-cytidine
  modified_base 41: mod_base = OTHER; note = 2'-O-Methyl-adenosine
  modified_base 42: mod_base = OTHER; note = 2'-O-Methyl-adenosine
  modified_base 45: mod_base = OTHER; note = uridine phosphorothioate
  modified_base 46: mod_base = OTHER; note = 2'-O-Methyl-adenosine
  modified_base 48: mod_base = OTHER; note = 2'-O-Methyl-adenosine
  modified_base 50: mod_base = OTHER; note = 2'-O-Methyl-uridine
  modified_base 52: mod_base = OTHER; note = 2'-O-Methyl-adenosine
  modified_base 53: mod_base = OTHER; note = 2'-O-Methyl-guanosine
  modified_base 54: mod_base = OTHER; note = 2'-O-Methyl-guanosine
  modified_base 55: mod_base = OTHER; note = 2'-O-Methyl-cytidine
  modified_base 56: mod_base = OTHER; note = 2'-O-Methyl-uridine
  modified_base 57: mod_base = OTHER; note = 2'-O-Methyl-adenosine
  modified_base 60: mod_base = OTHER; note = 2'-O-Methyl-cytidine
  modified_base 61: mod_base = OTHER; note = 2'-O-Methyl-cytidine
  modified_base 66: mod_base = OTHER; note = 2'-O-Methyl-uridine
  modified_base 67: mod_base = OTHER; note = 2'-O-Methyl-cytidine
  modified_base 70: mod_base = OTHER; note = 2'-O-Methyl-cytidine
  modified_base 71: mod_base = OTHER; note = 2'-O-Methyl-uridine
  modified_base 72: mod_base = OTHER; note = 2'-O-Methyl-uridine
  modified_base 74: mod_base = OTHER; note = 2'-O-Methyl-adenosine
  modified_base 75: mod_base = OTHER; note = 2'-O-Methyl-adenosine
  modified_base 76: mod_base = OTHER; note = 2'-O-Methyl-adenosine
  modified_base 77: mod_base = OTHER; note = 2'-O-Methyl-adenosine
  modified_base 78: mod_base = OTHER; note = 2'-O-Methyl-adenosine
  modified_base 79: mod_base = OTHER; note = 2'-O-Methyl-guanosine
  modified_base 80: mod_base = OTHER; note = 2'-O-Methyl-uridine
  modified_base 82: mod_base = OTHER; note = 2'-O-Methyl-guanosine
  modified_base 83: mod_base = OTHER; note = 2'-O-Methyl-cytidine
  modified_base 84: mod_base = OTHER; note = 2'-O-Methyl-adenosine
  modified_base 85: mod_base = OTHER; note = 2'-O-Methyl-cytidine
  modified_base 86: mod_base = OTHER; note = 2'-O-Methyl-cytidine
  modified_base 87: mod_base = OTHER; note = 2'-O-Methyl-guanosine
  modified_base 89: mod_base = OTHER; note = 2'-O-Methyl-guanosine
  modified_base 92: mod_base = OTHER; note = 2'-O-Methyl-guanosine
  modified_base 93: mod_base = OTHER; note = 2'-O-Methyl-guanosine
  modified_base 94: mod_base = OTHER; note = 2'-O-Methyl-uridine
  modified_base 95: mod_base = OTHER; note = 2'-O-Methyl-guanosine
  modified_base 96: mod_base = OTHER; note = 2'-O-Methyl-cytidine
  modified_base 97: mod_base = OTHER; note = 2'-O-Methyl-uridine
  modified_base 98: mod_base = OTHER; note = 2'-O-Methyl-uridine phosphorothioate
  modified_base 99: mod_base = OTHER; note = 2'-O-Methyl-uridine phosphorothioate
  modified_base 100: mod_base = OTHER; note = 2'-O-Methyl-uridine
  misc_difference 101: note = a, c, g, inosine, u, deoxyadenosine, deoxyguanosine, deoxycytidine, deoxyinosine, thymine, ribonebularine, 2'-O-methylnebularine, or 2'-deoxynebularine
  misc_difference 102: note = a, c, g, inosine, u, deoxyadenosine, deoxyguanosine, deoxycytidine, deoxyinosine, thymine, ribonebularine, 2'-O-methylnebularine, or 2'-deoxynebularine
  misc_difference 103: note = a, c, g, inosine, u, deoxyadenosine, deoxyguanosine, deoxycytidine, deoxyinosine, thymine, ribonebularine, 2'-O-methylnebularine, or 2'-deoxynebularine

SEQ ID NO: 2995 - RNA, 103 nt, synthetic construct; identical to SEQ ID NO: 1797
  source 1..103: mol_type = other RNA
  modified_base 1: mod_base = OTHER; note = 2'-O-Methyl-cytidine phosphorothioate
  modified_base 2: mod_base = OTHER; note = 2'-O-Methyl-adenosine phosphorothioate
  modified_base 3: mod_base = OTHER; note = 2'-O-Methyl-guanosine phosphorothioate
  modified_base 21: mod_base = OTHER; note = 2'-O-Methyl-guanosine
  modified_base 25: mod_base = OTHER; note = uridine phosphorothioate
  modified_base 28: mod_base = OTHER; note = 2'-O-Methyl-adenosine
  modified_base 29: mod_base = OTHER; note = 2'-O-Methyl-guanosine
  modified_base 30: mod_base = OTHER; note = 2'-O-Methyl-cytidine
  modified_base 31: mod_base = OTHER; note = 2'-O-Methyl-uridine
  modified_base 32: mod_base = OTHER; note = 2'-O-Methyl-adenosine
  modified_base 33: mod_base = OTHER; note = 2'-O-Methyl-guanosine
  modified_base 34: mod_base = OTHER; note = 2'-O-Methyl-adenosine
  modified_base 35: mod_base = OTHER; note = 2'-O-Methyl-adenosine
  modified_base 36: mod_base = OTHER; note = 2'-O-Methyl-adenosine
  modified_base 37: mod_base = OTHER; note = 2'-O-Methyl-uridine
  modified_base 38: mod_base = OTHER; note = 2'-O-Methyl-adenosine
  modified_base 39: mod_base = OTHER; note = 2'-O-Methyl-guanosine
  modified_base 40: mod_base = OTHER; note = 2'-O-Methyl-cytidine
  modified_base 41: mod_base = OTHER; note = 2'-O-Methyl-adenosine
  modified_base 42: mod_base = OTHER; note = 2'-O-Methyl-adenosine
  modified_base 45: mod_base = OTHER; note = uridine phosphorothioate
  modified_base 46: mod_base = OTHER; note = 2'-O-Methyl-adenosine
  modified_base 48: mod_base = OTHER; note = 2'-O-Methyl-adenosine
  modified_base 50: mod_base = OTHER; note = 2'-O-Methyl-uridine
  modified_base 52: mod_base = OTHER; note = 2'-O-Methyl-adenosine
  modified_base 53: mod_base = OTHER; note = 2'-O-Methyl-guanosine
  modified_base 54: mod_base = OTHER; note = 2'-O-Methyl-guanosine
  modified_base 57: mod_base = OTHER; note = 2'-O-Methyl-adenosine
  modified_base 61: mod_base = OTHER; note = 2'-O-Methyl-cytidine
  modified_base 66: mod_base = OTHER; note = 2'-O-Methyl-uridine
  modified_base 67: mod_base = OTHER; note = 2'-O-Methyl-cytidine
  modified_base 70: mod_base = OTHER; note = 2'-O-Methyl-cytidine
  modified_base 71: mod_base = OTHER; note = 2'-O-Methyl-uridine
  modified_base 72: mod_base = OTHER; note = 2'-O-Methyl-uridine
  modified_base 73: mod_base = OTHER; note = 2'-O-Methyl-guanosine
  modified_base 74: mod_base = OTHER; note = 2'-O-Methyl-adenosine
  modified_base 75: mod_base = OTHER; note = 2'-O-Methyl-adenosine
  modified_base 76: mod_base = OTHER; note = 2'-O-Methyl-adenosine
  modified_base 77: mod_base = OTHER; note = 2'-O-Methyl-adenosine
  modified_base 78: mod_base = OTHER; note = 2'-O-Methyl-adenosine
  modified_base 79: mod_base = OTHER; note = 2'-O-Methyl-guanosine
  modified_base 80: mod_base = OTHER; note = 2'-O-Methyl-uridine
  modified_base 82: mod_base = OTHER; note = 2'-O-Methyl-guanosine
  modified_base 83: mod_base = OTHER; note = 2'-O-Methyl-cytidine
  modified_base 84: mod_base = OTHER; note = 2'-O-Methyl-adenosine
  modified_base 85: mod_base = OTHER; note = 2'-O-Methyl-cytidine
  modified_base 86: mod_base = OTHER; note = 2'-O-Methyl-cytidine
  modified_base 87: mod_base = OTHER; note = 2'-O-Methyl-guanosine
  modified_base 89: mod_base = OTHER; note = 2'-O-Methyl-guanosine
  modified_base 92: mod_base = OTHER; note = 2'-O-Methyl-guanosine
  modified_base 93: mod_base = OTHER; note = 2'-O-Methyl-guanosine
  modified_base 94: mod_base = OTHER; note = 2'-O-Methyl-uridine
  modified_base 95: mod_base = OTHER; note = 2'-O-Methyl-guanosine
  modified_base 96: mod_base = OTHER; note = 2'-O-Methyl-cytidine
  modified_base 97: mod_base = OTHER; note = 2'-O-Methyl-uridine
  modified_base 98: mod_base = OTHER; note = 2'-O-Methyl-uridine phosphorothioate
  modified_base 99: mod_base = OTHER; note = 2'-O-Methyl-uridine phosphorothioate
  modified_base 100: mod_base = OTHER; note = 2'-O-Methyl-uridine
  misc_difference 101: note = a, c, g, inosine, u, deoxyadenosine, deoxyguanosine, deoxycytidine, deoxyinosine, thymine, ribonebularine, 2'-O-methylnebularine, or 2'-deoxynebularine
  misc_difference 102: note = a, c, g, inosine, u, deoxyadenosine, deoxyguanosine, deoxycytidine, deoxyinosine, thymine, ribonebularine, 2'-O-methylnebularine, or 2'-deoxynebularine
  misc_difference 103: note = a, c, g, inosine, u, deoxyadenosine, deoxyguanosine, deoxycytidine, deoxyinosine, thymine, ribonebularine, 2'-O-methylnebularine, or 2'-deoxynebularine

SEQ ID NO: 2996 - RNA, 103 nt, synthetic construct; identical to SEQ ID NO: 1797
  source 1..103: mol_type = other RNA
  modified_base 1: mod_base = OTHER; note = 2'-O-Methyl-cytidine phosphorothioate
  modified_base 2: mod_base = OTHER; note = 2'-O-Methyl-adenosine phosphorothioate
  modified_base 3: mod_base = OTHER; note = 2'-O-Methyl-guanosine phosphorothioate
  modified_base 21: mod_base = OTHER; note = 2'-O-Methyl-guanosine
  modified_base 25: mod_base = OTHER; note = uridine phosphorothioate
  modified_base 28: mod_base = OTHER; note = 2'-O-Methyl-adenosine
  modified_base 29: mod_base = OTHER; note = 2'-O-Methyl-guanosine
  modified_base 30: mod_base = OTHER; note = 2'-O-Methyl-cytidine
  modified_base 31: mod_base = OTHER; note = 2'-O-Methyl-uridine
  modified_base 32: mod_base = OTHER; note = 2'-O-Methyl-adenosine
  modified_base 33: mod_base = OTHER; note = 2'-O-Methyl-guanosine
  modified_base 34: mod_base = OTHER; note = 2'-O-Methyl-adenosine
  modified_base 35: mod_base = OTHER; note = 2'-O-Methyl-adenosine
  modified_base 36: mod_base = OTHER; note = 2'-O-Methyl-adenosine
  modified_base 37: mod_base = OTHER; note = 2'-O-Methyl-uridine
  modified_base 38: mod_base = OTHER; note = 2'-O-Methyl-adenosine
  modified_base 39: mod_base = OTHER; note = 2'-O-Methyl-guanosine
  modified_base 40: mod_base = OTHER; note = 2'-O-Methyl-cytidine
  modified_base 41: mod_base = OTHER; note = 2'-O-Methyl-adenosine
  modified_base 42: mod_base = OTHER; note = 2'-O-Methyl-adenosine
  modified_base 45: mod_base = OTHER; note = uridine phosphorothioate
  modified_base 46: mod_base = OTHER; note = 2'-O-Methyl-adenosine
  modified_base 48: mod_base = OTHER; note = 2'-O-Methyl-adenosine
  modified_base 50: mod_base = OTHER; note = 2'-O-Methyl-uridine
  modified_base 52: mod_base = OTHER; note = 2'-O-Methyl-adenosine
  modified_base 53: mod_base = OTHER; note = 2'-O-Methyl-guanosine
  modified_base 54: mod_base = OTHER; note = 2'-O-Methyl-guanosine
  modified_base 57: mod_base = OTHER; note = 2'-O-Methyl-adenosine
  modified_base 61: mod_base = OTHER; note = 2'-O-Methyl-cytidine
  modified_base 66: mod_base = OTHER; note = 2'-O-Methyl-uridine
  modified_base 67: mod_base = OTHER; note = 2'-O-Methyl-cytidine
  modified_base 70: mod_base = OTHER; note = 2'-O-Methyl-cytidine
  modified_base 71: mod_base = OTHER; note = 2'-O-Methyl-uridine
  modified_base 72: mod_base = OTHER; note = 2'-O-Methyl-uridine
  modified_base 73: mod_base = OTHER; note = 2'-O-Methyl-guanosine
  modified_base 74: mod_base = OTHER; note = 2'-O-Methyl-adenosine
  modified_base 75: mod_base = OTHER; note = 2'-O-Methyl-adenosine
  modified_base 76: mod_base = OTHER; note = 2'-O-Methyl-adenosine
  modified_base 77: mod_base = OTHER; note = 2'-O-Methyl-adenosine
  modified_base 78: mod_base = OTHER; note = 2'-O-Methyl-adenosine
  modified_base 79: mod_base = OTHER; note = 2'-O-Methyl-guanosine
  modified_base 80: mod_base = OTHER; note = 2'-O-Methyl-uridine
  modified_base 82: mod_base = OTHER; note = 2'-O-Methyl-guanosine
  modified_base 83: mod_base = OTHER; note = 2'-O-Methyl-cytidine
  modified_base 84: mod_base = OTHER; note = 2'-O-Methyl-adenosine
  modified_base 85: mod_base = OTHER; note = 2'-O-Methyl-cytidine
  modified_base 86: mod_base = OTHER; note = 2'-O-Methyl-cytidine
  modified_base 87: mod_base = OTHER; note = 2'-O-Methyl-guanosine
  modified_base 89: mod_base = OTHER; note = 2'-O-Methyl-guanosine
  modified_base 91: mod_base = OTHER; note = 2'-O-Methyl-cytidine
  modified_base 92: mod_base = OTHER; note = 2'-O-Methyl-guanosine
  modified_base 93: mod_base = OTHER; note = 2'-O-Methyl-guanosine
  modified_base 94: mod_base = OTHER; note = 2'-O-Methyl-uridine
  modified_base 95: mod_base = OTHER; note = 2'-O-Methyl-guanosine
  modified_base 96: mod_base = OTHER; note = 2'-O-Methyl-cytidine
  modified_base 97: mod_base = OTHER; note = 2'-O-Methyl-uridine
  modified_base 98: mod_base = OTHER; note = 2'-O-Methyl-uridine phosphorothioate
  modified_base 99: mod_base = OTHER; note = 2'-O-Methyl-uridine phosphorothioate
  modified_base 100: mod_base = OTHER; note = 2'-O-Methyl-uridine
  misc_difference 101: note = a, c, g, inosine, u, deoxyadenosine, deoxyguanosine, deoxycytidine, deoxyinosine, thymine, ribonebularine, 2'-O-methylnebularine, or 2'-deoxynebularine
  misc_difference 102: note = a, c, g, inosine, u, deoxyadenosine, deoxyguanosine, deoxycytidine, deoxyinosine, thymine, ribonebularine, 2'-O-methylnebularine, or 2'-deoxynebularine
  misc_difference 103: note = a, c, g, inosine, u, deoxyadenosine, deoxyguanosine, deoxycytidine, deoxyinosine, thymine, ribonebularine, 2'-O-methylnebularine, or 2'-deoxynebularine

SEQ ID NO: 2997 - RNA, 103 nt, synthetic construct; identical to SEQ ID NO: 1797
  source 1..103: mol_type = other RNA
  modified_base 1: mod_base = OTHER; note = 2'-O-Methyl-cytidine phosphorothioate
  modified_base 2: mod_base = OTHER; note = 2'-O-Methyl-adenosine phosphorothioate
  modified_base 3: mod_base = OTHER; note = 2'-O-Methyl-guanosine phosphorothioate
  modified_base 21: mod_base = OTHER; note = 2'-O-Methyl-guanosine
  modified_base 25: mod_base = OTHER; note = uridine phosphorothioate
  modified_base 28: mod_base = OTHER; note = 2'-O-Methyl-adenosine
  modified_base 29: mod_base = OTHER; note = 2'-O-Methyl-guanosine
  modified_base 30: mod_base = OTHER; note = 2'-O-Methyl-cytidine
  modified_base 31: mod_base = OTHER; note = 2'-O-Methyl-uridine
  modified_base 32: mod_base = OTHER; note = 2'-O-Methyl-adenosine
  modified_base 34: mod_base = OTHER; note = 2'-O-Methyl-adenosine
  modified_base 35: mod_base = OTHER; note = 2'-O-Methyl-adenosine
  modified_base 36: mod_base = OTHER; note = 2'-O-Methyl-adenosine
  modified_base 37: mod_base = OTHER; note = 2'-O-Methyl-uridine
  modified_base 38: mod_base = OTHER; note = 2'-O-Methyl-adenosine
  modified_base 39: mod_base = OTHER; note = 2'-O-Methyl-guanosine
  modified_base 40: mod_base = OTHER; note = 2'-O-Methyl-cytidine
  modified_base 41: mod_base = OTHER; note = 2'-O-Methyl-adenosine
  modified_base 42: mod_base = OTHER; note = 2'-O-Methyl-adenosine
  modified_base 45: mod_base = OTHER; note = uridine phosphorothioate
  modified_base 46: mod_base = OTHER; note = 2'-O-Methyl-adenosine
  modified_base 48: mod_base = OTHER; note = 2'-O-Methyl-adenosine
  modified_base 50: mod_base = OTHER; note = 2'-O-Methyl-uridine
  modified_base 52: mod_base = OTHER; note = 2'-O-Methyl-adenosine
  modified_base 53: mod_base = OTHER; note = 2'-O-Methyl-guanosine
  modified_base 54: mod_base = OTHER; note = 2'-O-Methyl-guanosine
  modified_base 57: mod_base = OTHER; note = 2'-O-Methyl-adenosine
  modified_base 61: mod_base = OTHER; note = 2'-O-Methyl-cytidine
  modified_base 66: mod_base = OTHER; note = 2'-O-Methyl-uridine
  modified_base 67: mod_base = OTHER; note = 2'-O-Methyl-cytidine
  modified_base 70: mod_base = OTHER; note = 2'-O-Methyl-cytidine
  modified_base 71: mod_base = OTHER; note = 2'-O-Methyl-uridine
  modified_base 72: mod_base = OTHER; note = 2'-O-Methyl-uridine
  modified_base 73: mod_base = OTHER; note = 2'-O-Methyl-guanosine
  modified_base 74: mod_base = OTHER; note = 2'-O-Methyl-adenosine
  modified_base 75: mod_base = OTHER; note = 2'-O-Methyl-adenosine
  modified_base 76: mod_base = OTHER; note = 2'-O-Methyl-adenosine
  modified_base 77: mod_base = OTHER; note = 2'-O-Methyl-adenosine
  modified_base 78: mod_base = OTHER; note = 2'-O-Methyl-adenosine
  modified_base 79: mod_base = OTHER; note = 2'-O-Methyl-guanosine
  modified_base 80: mod_base = OTHER; note = 2'-O-Methyl-uridine
  modified_base 82: mod_base = OTHER; note = 2'-O-Methyl-guanosine
  modified_base 83: mod_base = OTHER; note = 2'-O-Methyl-cytidine
  modified_base 84: mod_base = OTHER; note = 2'-O-Methyl-adenosine
  modified_base 85: mod_base = OTHER; note = 2'-O-Methyl-cytidine
  modified_base 86: mod_base = OTHER; note = 2'-O-Methyl-cytidine
  modified_base 87: mod_base = OTHER; note = 2'-O-Methyl-guanosine
  modified_base 89: mod_base = OTHER; note = 2'-O-Methyl-guanosine
  modified_base 92: mod_base = OTHER; note = 2'-O-Methyl-guanosine
  modified_base 93: mod_base = OTHER; note = 2'-O-Methyl-guanosine
  modified_base 94: mod_base = OTHER; note = 2'-O-Methyl-uridine
  modified_base 95: mod_base = OTHER; note = 2'-O-Methyl-guanosine
  modified_base 96: mod_base = OTHER; note = 2'-O-Methyl-cytidine
  modified_base 97: mod_base = OTHER; note = 2'-O-Methyl-uridine
  modified_base 98: mod_base = OTHER; note = 2'-O-Methyl-uridine phosphorothioate
  modified_base 99: mod_base = OTHER; note = 2'-O-Methyl-uridine phosphorothioate
  modified_base 100: mod_base = OTHER; note = 2'-O-Methyl-uridine
  misc_difference 101: note = a, c, g, inosine, u, deoxyadenosine, deoxyguanosine, deoxycytidine, deoxyinosine, thymine, ribonebularine, 2'-O-methylnebularine, or 2'-deoxynebularine
  misc_difference 102: note = a, c, g, inosine, u, deoxyadenosine, deoxyguanosine, deoxycytidine, deoxyinosine, thymine, ribonebularine, 2'-O-methylnebularine, or 2'-deoxynebularine
  misc_difference 103: note = a, c, g, inosine, u, deoxyadenosine, deoxyguanosine, deoxycytidine, deoxyinosine, thymine, ribonebularine, 2'-O-methylnebularine, or 2'-deoxynebularine

SEQ ID NO: 2998 - RNA, 103 nt, synthetic construct; identical to SEQ ID NO: 1797
  source 1..103: mol_type = other RNA
  modified_base 1: mod_base = OTHER; note = 2'-O-Methyl-cytidine phosphorothioate
  modified_base 2: mod_base = OTHER; note = 2'-O-Methyl-adenosine phosphorothioate
  modified_base 3: mod_base = OTHER; note = 2'-O-Methyl-guanosine phosphorothioate
  modified_base 21: mod_base = OTHER; note = 2'-O-Methyl-guanosine
  modified_base 25: mod_base = OTHER; note = uridine phosphorothioate
  modified_base 28: mod_base = OTHER; note = 2'-O-Methyl-adenosine
  modified_base 29: mod_base = OTHER; note = 2'-O-Methyl-guanosine
  modified_base 30: mod_base = OTHER; note = 2'-O-Methyl-cytidine
  modified_base 31: mod_base = OTHER; note = 2'-O-Methyl-uridine
  modified_base 32: mod_base = OTHER; note = 2'-O-Methyl-adenosine
  modified_base 34: mod_base = OTHER; note = 2'-O-Methyl-adenosine
  modified_base 35: mod_base = OTHER; note = 2'-O-Methyl-adenosine
  modified_base 36: mod_base = OTHER; note = 2'-O-Methyl-adenosine
  modified_base 37: mod_base = OTHER; note = 2'-O-Methyl-uridine
  modified_base 38: mod_base = OTHER; note = 2'-O-Methyl-adenosine
  modified_base 39: mod_base = OTHER; note = 2'-O-Methyl-guanosine
  modified_base 40: mod_base = OTHER; note = 2'-O-Methyl-cytidine
  modified_base 41: mod_base = OTHER; note = 2'-O-Methyl-adenosine
  modified_base 42: mod_base = OTHER; note = 2'-O-Methyl-adenosine
  modified_base 45: mod_base = OTHER; note = uridine phosphorothioate
  modified_base 46: mod_base = OTHER; note = 2'-O-Methyl-adenosine
  modified_base 48: mod_base = OTHER; note = 2'-O-Methyl-adenosine
  modified_base 50: mod_base = OTHER; note = 2'-O-Methyl-uridine
  modified_base 52: mod_base = OTHER; note = 2'-O-Methyl-adenosine
  modified_base 53: mod_base = OTHER; note = 2'-O-Methyl-guanosine
  modified_base 54: mod_base = OTHER; note = 2'-O-Methyl-guanosine
  modified_base 57: mod_base = OTHER; note = 2'-O-Methyl-adenosine
  modified_base 61: mod_base = OTHER; note = 2'-O-Methyl-cytidine
  modified_base 66: mod_base = OTHER; note = 2'-O-Methyl-uridine
  modified_base 67: mod_base = OTHER; note = 2'-O-Methyl-cytidine
  modified_base 70: mod_base = OTHER; note = 2'-O-Methyl-cytidine
  modified_base 71: mod_base = OTHER; note = 2'-O-Methyl-uridine
  modified_base 72: mod_base = OTHER; note = 2'-O-Methyl-uridine
  modified_base 73: mod_base = OTHER; note = 2'-O-Methyl-guanosine
  modified_base 74: mod_base = OTHER; note = 2'-O-Methyl-adenosine
  modified_base 75: mod_base = OTHER; note = 2'-O-Methyl-adenosine
  modified_base 76: mod_base = OTHER; note = 2'-O-Methyl-adenosine
  modified_base 77: mod_base = OTHER; note = 2'-O-Methyl-adenosine
  modified_base 78: mod_base = OTHER; note = 2'-O-Methyl-adenosine
  modified_base 79: mod_base = OTHER; note = 2'-O-Methyl-guanosine
  modified_base 80: mod_base = OTHER; note = 2'-O-Methyl-uridine
  modified_base 82: mod_base = OTHER; note = 2'-O-Methyl-guanosine
  modified_base 83: mod_base = OTHER; note = 2'-O-Methyl-cytidine
  modified_base 84: mod_base = OTHER; note = 2'-O-Methyl-adenosine
  modified_base 85: mod_base = OTHER; note = 2'-O-Methyl-cytidine
  modified_base 86: mod_base = OTHER; note = 2'-O-Methyl-cytidine
  modified_base 87: mod_base = OTHER; note = 2'-O-Methyl-guanosine
  modified_base 89: mod_base = OTHER; note = 2'-O-Methyl-guanosine
  modified_base 91: mod_base = OTHER; note = 2'-O-Methyl-cytidine
  modified_base 92: mod_base = OTHER; note = 2'-O-Methyl-guanosine
  modified_base 93: mod_base = OTHER; note = 2'-O-Methyl-guanosine
  modified_base 94: mod_base = OTHER; note = 2'-O-Methyl-uridine
  modified_base 95: mod_base = OTHER; note = 2'-O-Methyl-guanosine
  modified_base 96: mod_base = OTHER; note = 2'-O-Methyl-cytidine
  modified_base 97: mod_base = OTHER; note = 2'-O-Methyl-uridine
  modified_base 98: mod_base = OTHER; note = 2'-O-Methyl-uridine phosphorothioate
  modified_base 99: mod_base = OTHER; note = 2'-O-Methyl-uridine phosphorothioate
  modified_base 100: mod_base = OTHER; note = 2'-O-Methyl-uridine
  misc_difference 101: note = a, c, g, inosine, u, deoxyadenosine, deoxyguanosine, deoxycytidine, deoxyinosine, thymine, ribonebularine, 2'-O-methylnebularine, or 2'-deoxynebularine
  misc_difference 102: note = a, c, g, inosine, u, deoxyadenosine, deoxyguanosine, deoxycytidine, deoxyinosine, thymine, ribonebularine, 2'-O-methylnebularine, or 2'-deoxynebularine
  misc_difference 103: note = a, c, g, inosine, u, deoxyadenosine, deoxyguanosine, deoxycytidine, deoxyinosine, thymine, ribonebularine, 2'-O-methylnebularine, or 2'-deoxynebularine

SEQ ID NO: 2999 - RNA, 103 nt, synthetic construct; identical to SEQ ID NO: 1797
  source 1..103: mol_type = other RNA
  modified_base 1: mod_base = OTHER; note = 2'-O-Methyl-cytidine phosphorothioate
  modified_base 2: mod_base = OTHER; note = 2'-O-Methyl-adenosine phosphorothioate
  modified_base 3: mod_base = OTHER; note = 2'-O-Methyl-guanosine phosphorothioate
  modified_base 21: mod_base = OTHER; note = 2'-O-Methyl-guanosine
  modified_base 25: mod_base = OTHER; note = uridine phosphorothioate
  modified_base 28: mod_base = OTHER; note = 2'-O-Methyl-adenosine
  modified_base 29: mod_base = OTHER; note = 2'-O-Methyl-guanosine
  modified_base 30: mod_base = OTHER; note = 2'-O-Methyl-cytidine
  modified_base 31: mod_base = OTHER; note = 2'-O-Methyl-uridine
  modified_base 32: mod_base = OTHER; note = 2'-O-Methyl-adenosine
  modified_base 34: mod_base = OTHER; note = 2'-O-Methyl-adenosine
  modified_base 35: mod_base = OTHER; note = 2'-O-Methyl-adenosine
  modified_base 36: mod_base = OTHER; note = 2'-O-Methyl-adenosine
  modified_base 37: mod_base = OTHER; note = 2'-O-Methyl-uridine
  modified_base 38: mod_base = OTHER; note = 2'-O-Methyl-adenosine
  modified_base 39: mod_base = OTHER; note = 2'-O-Methyl-guanosine
  modified_base 40: mod_base = OTHER; note = 2'-O-Methyl-cytidine
  modified_base 41: mod_base = OTHER; note = 2'-O-Methyl-adenosine
  modified_base 42: mod_base = OTHER; note = 2'-O-Methyl-adenosine
  modified_base 45: mod_base = OTHER; note = uridine phosphorothioate
  modified_base 46: mod_base = OTHER; note = 2'-O-Methyl-adenosine
  modified_base 48: mod_base = OTHER; note = 2'-O-Methyl-adenosine
  modified_base 50: mod_base = OTHER; note = 2'-O-Methyl-uridine
  modified_base 52: mod_base = OTHER; note = 2'-O-Methyl-adenosine
  modified_base 53: mod_base = OTHER; note = 2'-O-Methyl-guanosine
  modified_base 54: mod_base = OTHER; note = 2'-O-Methyl-guanosine
  modified_base 55: mod_base = OTHER; note = 2'-O-Methyl-cytidine
  modified_base 56: mod_base = OTHER; note = 2'-O-Methyl-uridine
  modified_base 57: mod_base = OTHER; note = 2'-O-Methyl-adenosine
  modified_base 60: mod_base = OTHER; note = 2'-O-Methyl-cytidine
  modified_base 61: mod_base = OTHER; note = 2'-O-Methyl-cytidine
  modified_base 66: mod_base = OTHER; note = 2'-O-Methyl-uridine
  modified_base 67: mod_base = OTHER; note = 2'-O-Methyl-cytidine
  modified_base 70: mod_base = OTHER; note = 2'-O-Methyl-cytidine
  modified_base 71: mod_base = OTHER; note = 2'-O-Methyl-uridine
  modified_base 72: mod_base = OTHER; note = 2'-O-Methyl-uridine
  modified_base 74: mod_base = OTHER; note = 2'-O-Methyl-adenosine
  modified_base 75: mod_base = OTHER; note = 2'-O-Methyl-adenosine
  modified_base 76: mod_base = OTHER; note = 2'-O-Methyl-adenosine
  modified_base 77: mod_base = OTHER; note = 2'-O-Methyl-adenosine
  modified_base 78: mod_base = OTHER; note = 2'-O-Methyl-adenosine
  modified_base 79: mod_base = OTHER; note = 2'-O-Methyl-guanosine
  modified_base 80: mod_base = OTHER; note = 2'-O-Methyl-uridine
  modified_base 82: mod_base = OTHER; note = 2'-O-Methyl-guanosine
  modified_base 83: mod_base = OTHER; note = 2'-O-Methyl-cytidine
  modified_base 84: mod_base = OTHER; note = 2'-O-Methyl-adenosine
  modified_base 85: mod_base = OTHER; note = 2'-O-Methyl-cytidine
  modified_base 86: mod_base = OTHER; note = 2'-O-Methyl-cytidine
  modified_base 87: mod_base = OTHER; note = 2'-O-Methyl-guanosine
  modified_base 89: mod_base = OTHER; note = 2'-O-Methyl-guanosine
  modified_base 92: mod_base = OTHER; note = 2'-O-Methyl-guanosine
  modified_base 93: mod_base = OTHER; note = 2'-O-Methyl-guanosine
  modified_base 94: mod_base = OTHER; note = 2'-O-Methyl-uridine
  modified_base 95: mod_base = OTHER; note = 2'-O-Methyl-guanosine
  modified_base 96: mod_base = OTHER; note = 2'-O-Methyl-cytidine
  modified_base 97: mod_base = OTHER; note = 2'-O-Methyl-uridine
  modified_base 98: mod_base = OTHER; note = 2'-O-Methyl-uridine phosphorothioate
  modified_base 99: mod_base = OTHER; note = 2'-O-Methyl-uridine phosphorothioate
  modified_base 100: mod_base = OTHER; note = 2'-O-Methyl-uridine
  misc_difference 101: note = a, c, g, inosine, u, deoxyadenosine, deoxyguanosine, deoxycytidine, deoxyinosine, thymine, ribonebularine, 2'-O-methylnebularine, or 2'-deoxynebularine
  misc_difference 102: note = a, c, g, inosine, u, deoxyadenosine, deoxyguanosine, deoxycytidine, deoxyinosine, thymine, ribonebularine, 2'-O-methylnebularine, or 2'-deoxynebularine
  misc_difference 103: note = a, c, g, inosine, u, deoxyadenosine, deoxyguanosine, deoxycytidine, deoxyinosine, thymine, ribonebularine, 2'-O-methylnebularine, or 2'-deoxynebularine

SEQ ID NO: 3000 - RNA, 103 nt, synthetic construct; identical to SEQ ID NO: 1795
  source 1..103: mol_type = other RNA
  modified_base 1: mod_base = OTHER; note = 2'-O-Methyl-cytidine phosphorothioate
  modified_base 2: mod_base = OTHER; note = 2'-O-Methyl-cytidine phosphorothioate
  modified_base 3: mod_base = OTHER; note = 2'-O-Methyl-cytidine phosphorothioate
  modified_base 21: mod_base = OTHER; note = 2'-O-Methyl-guanosine
  modified_base 25: mod_base = OTHER; note = uridine phosphorothioate
  modified_base 28: mod_base = OTHER; note = 2'-O-Methyl-adenosine
  modified_base 29: mod_base = OTHER; note = 2'-O-Methyl-guanosine
  modified_base 30: mod_base = OTHER; note = 2'-O-Methyl-cytidine
  modified_base 31: mod_base = OTHER; note = 2'-O-Methyl-uridine
  modified_base 32: mod_base = OTHER; note = 2'-O-Methyl-adenosine
  modified_base 33: mod_base = OTHER; note = 2'-O-Methyl-guanosine
  modified_base 34: mod_base = OTHER; note = 2'-O-Methyl-adenosine
  modified_base 35: mod_base = OTHER; note = 2'-O-Methyl-adenosine
  modified_base 36: mod_base = OTHER; note = 2'-O-Methyl-adenosine
  modified_base 37: mod_base = OTHER; note = 2'-O-Methyl-uridine
  modified_base 38: mod_base = OTHER; note = 2'-O-Methyl-adenosine
  modified_base 39: mod_base = OTHER; note = 2'-O-Methyl-guanosine
  modified_base 40: mod_base = OTHER; note = 2'-O-Methyl-cytidine
  modified_base 41: mod_base = OTHER; note = 2'-O-Methyl-adenosine
  modified_base 42: mod_base = OTHER; note = 2'-O-Methyl-adenosine
  modified_base 46: mod_base = OTHER; note = 2'-O-Methyl-adenosine
  modified_base 48: mod_base = OTHER; note = 2'-O-Methyl-adenosine
  modified_base 50: mod_base = OTHER; note = 2'-O-Methyl-uridine
  modified_base 52: mod_base = OTHER; note = 2'-O-Methyl-adenosine
  modified_base 53: mod_base = OTHER; note = 2'-O-Methyl-guanosine
  modified_base 54: mod_base = OTHER; note = 2'-O-Methyl-guanosine
  modified_base 55: mod_base = OTHER; note = 2'-O-Methyl-cytidine
  modified_base 56: mod_base = OTHER; note = 2'-O-Methyl-uridine
  modified_base 57: mod_base = OTHER; note = 2'-O-Methyl-adenosine
  modified_base 60: mod_base = OTHER; note = 2'-O-Methyl-cytidine
  modified_base 61: mod_base = OTHER; note = 2'-O-Methyl-cytidine
  modified_base 64: mod_base = OTHER; note = uridine phosphorothioate
  modified_base 66: mod_base = OTHER; note = 2'-O-Methyl-uridine
  modified_base 67: mod_base = OTHER; note = 2'-O-Methyl-cytidine
  modified_base 70: mod_base = OTHER; note = 2'-O-Methyl-cytidine
  modified_base 71: mod_base = OTHER; note = 2'-O-Methyl-uridine
  modified_base 72: mod_base = OTHER; note = 2'-O-Methyl-uridine
  modified_base 73: mod_base = OTHER; note = 2'-O-Methyl-guanosine
  modified_base 74: mod_base = OTHER; note = 2'-O-Methyl-adenosine
  modified_base 75: mod_base = OTHER; note = 2'-O-Methyl-adenosine
  modified_base 76: mod_base = OTHER; note = 2'-O-Methyl-adenosine
  modified_base 77: mod_base = OTHER; note = 2'-O-Methyl-adenosine
  modified_base 78: mod_base = OTHER; note = 2'-O-Methyl-adenosine
  modified_base 79: mod_base = OTHER; note = 2'-O-Methyl-guanosine
  modified_base 80: mod_base = OTHER; note = 2'-O-Methyl-uridine
  modified_base 81: mod_base = OTHER; note = 2'-O-Methyl-guanosine
  modified_base 83: mod_base = OTHER; note = 2'-O-Methyl-cytidine
  modified_base 84: mod_base = OTHER; note = 2'-O-Methyl-adenosine
  modified_base 85: mod_base = OTHER; note = 2'-O-Methyl-cytidine
  modified_base 86: mod_base = OTHER; note = 2'-O-Methyl-cytidine
  modified_base 87: mod_base = OTHER; note = 2'-O-Methyl-guanosine
  modified_base 88: mod_base = OTHER; note = 2'-O-Methyl-adenosine
  modified_base 89: mod_base = OTHER; note = 2'-O-Methyl-guanosine
  modified_base 90: mod_base = OTHER; note = 2'-O-Methyl-uridine
  modified_base 91: mod_base = OTHER; note = 2'-O-Methyl-cytidine
  modified_base 92: mod_base = OTHER; note = 2'-O-Methyl-guanosine
  modified_base 93: mod_base = OTHER; note = 2'-O-Methyl-guanosine
  modified_base 94: mod_base = OTHER; note = 2'-O-Methyl-uridine
  modified_base 95: mod_base = OTHER; note = 2'-O-Methyl-guanosine
  modified_base 96: mod_base = OTHER; note = 2'-O-Methyl-cytidine
  modified_base 97: mod_base = OTHER; note = 2'-O-Methyl-uridine
  modified_base 98: mod_base = OTHER; note = 2'-O-Methyl-uridine phosphorothioate
  modified_base 99: mod_base = OTHER; note = 2'-O-Methyl-uridine phosphorothioate
  modified_base 100: mod_base = OTHER; note = 2'-O-Methyl-uridine
  misc_difference 101: note = a, c, g, inosine, u, deoxyadenosine, deoxyguanosine, deoxycytidine, deoxyinosine, thymine, ribonebularine, 2'-O-methylnebularine, or 2'-deoxynebularine
  misc_difference 102: note = a, c, g, inosine, u, deoxyadenosine, deoxyguanosine, deoxycytidine, deoxyinosine, thymine, ribonebularine, 2'-O-methylnebularine, or 2'-deoxynebularine
  misc_difference 103: note = a, c, g, inosine, u, deoxyadenosine, deoxyguanosine, deoxycytidine, deoxyinosine, thymine, ribonebularine, 2'-O-methylnebularine, or 2'-deoxynebularine

SEQ ID NO: 3001 - RNA, 103 nt, synthetic construct; identical to SEQ ID NO: 1795
  source 1..103: mol_type = other RNA
  modified_base 1: mod_base = OTHER; note = 2'-O-Methyl-cytidine phosphorothioate
  modified_base 2: mod_base = OTHER; note = 2'-O-Methyl-cytidine phosphorothioate
  modified_base 3: mod_base = OTHER; note = 2'-O-Methyl-cytidine phosphorothioate
  modified_base 21: mod_base = OTHER; note = 2'-O-Methyl-guanosine
  modified_base 25: mod_base = OTHER; note = uridine phosphorothioate
  modified_base 28: mod_base = OTHER; note = 2'-O-Methyl-adenosine
  modified_base 29: mod_base = OTHER; note = 2'-O-Methyl-guanosine
  modified_base 30: mod_base = OTHER; note = 2'-O-Methyl-cytidine
  modified_base 31: mod_base = OTHER; note = 2'-O-Methyl-uridine
  modified_base 32: mod_base = OTHER; note = 2'-O-Methyl-adenosine
  modified_base 34: mod_base = OTHER; note = 2'-O-Methyl-adenosine
  modified_base 35: mod_base = OTHER; note = 2'-O-Methyl-adenosine
  modified_base 36: mod_base = OTHER; note = 2'-O-Methyl-adenosine
  modified_base 37: mod_base = OTHER; note = 2'-O-Methyl-uridine
  modified_base 38: mod_base = OTHER; note = 2'-O-Methyl-adenosine
  modified_base 39: mod_base = OTHER; note = 2'-O-Methyl-guanosine
  modified_base 40: mod_base = OTHER; note = 2'-O-Methyl-cytidine
  modified_base 41: mod_base = OTHER; note = 2'-O-Methyl-adenosine
  modified_base 42: mod_base = OTHER; note = 2'-O-Methyl-adenosine
  modified_base 46: mod_base = OTHER; note = 2'-O-Methyl-adenosine
  modified_base 48: mod_base = OTHER; note = 2'-O-Methyl-adenosine
  modified_base 50: mod_base = OTHER; note = 2'-O-Methyl-uridine
  modified_base 52: mod_base = OTHER; note = 2'-O-Methyl-adenosine
  modified_base 53: mod_base = OTHER; note = 2'-O-Methyl-guanosine
  modified_base 54: mod_base = OTHER; note = 2'-O-Methyl-guanosine
  modified_base 55: mod_base = OTHER; note = 2'-O-Methyl-cytidine
  modified_base 56: mod_base = OTHER; note = 2'-O-Methyl-uridine
  modified_base 57: mod_base = OTHER; note = 2'-O-Methyl-adenosine
  modified_base 60: mod_base = OTHER; note = 2'-O-Methyl-cytidine
  modified_base 61: mod_base = OTHER; note = 2'-O-Methyl-cytidine
  modified_base 64: mod_base = OTHER; note = uridine phosphorothioate
  modified_base 66: mod_base = OTHER; note = 2'-O-Methyl-uridine
  modified_base 67: mod_base = OTHER; note = 2'-O-Methyl-cytidine
  modified_base 70: mod_base = OTHER; note = 2'-O-Methyl-cytidine
  modified_base 71: mod_base = OTHER; note = 2'-O-Methyl-uridine
  modified_base 72: mod_base = OTHER; note = 2'-O-Methyl-uridine
  modified_base 74: mod_base = OTHER; note = 2'-O-Methyl-adenosine
  modified_base 75: mod_base = OTHER; note = 2'-O-Methyl-adenosine
  modified_base 76: mod_base = OTHER; note = 2'-O-Methyl-adenosine
  modified_base 77: mod_base = OTHER; note = 2'-O-Methyl-adenosine
  modified_base 78: mod_base = OTHER; note = 2'-O-Methyl-adenosine
  modified_base 79: mod_base = OTHER; note = 2'-O-Methyl-guanosine
  modified_base 80: mod_base = OTHER; note = 2'-O-Methyl-uridine
  modified_base 81: mod_base = OTHER; note = 2'-O-Methyl-guanosine
  modified_base 83: mod_base = OTHER; note = 2'-O-Methyl-cytidine
  modified_base 84: mod_base = OTHER; note = 2'-O-Methyl-adenosine
  modified_base 85: mod_base = OTHER; note = 2'-O-Methyl-cytidine
  modified_base 86: mod_base = OTHER; note = 2'-O-Methyl-cytidine
  modified_base 87: mod_base = OTHER; note = 2'-O-Methyl-guanosine
  modified_base 88: mod_base = OTHER; note = 2'-O-Methyl-adenosine
  modified_base 89: mod_base = OTHER; note = 2'-O-Methyl-guanosine
  modified_base 90: mod_base = OTHER; note = 2'-O-Methyl-uridine
  modified_base 91: mod_base = OTHER; note = 2'-O-Methyl-cytidine
  modified_base 92: mod_base = OTHER; note = 2'-O-Methyl-guanosine
  modified_base 93: mod_base = OTHER; note = 2'-O-Methyl-guanosine
  modified_base 94: mod_base = OTHER; note = 2'-O-Methyl-uridine
  modified_base 95: mod_base = OTHER; note = 2'-O-Methyl-guanosine
  modified_base 96: mod_base = OTHER; note = 2'-O-Methyl-cytidine
  modified_base 97: mod_base = OTHER; note = 2'-O-Methyl-uridine
  modified_base 98: mod_base = OTHER; note = 2'-O-Methyl-uridine phosphorothioate
  modified_base 99: mod_base = OTHER; note = 2'-O-Methyl-uridine phosphorothioate
  modified_base 100: mod_base = OTHER; note = 2'-O-Methyl-uridine
  misc_difference 101: note = a, c, g, inosine, u, deoxyadenosine, deoxyguanosine, deoxycytidine, deoxyinosine, thymine, ribonebularine, 2'-O-methylnebularine, or 2'-deoxynebularine
  misc_difference 102: note = a, c, g, inosine, u, deoxyadenosine, deoxyguanosine, deoxycytidine, deoxyinosine, thymine, ribonebularine, 2'-O-methylnebularine, or 2'-deoxynebularine
  misc_difference 103: note = a, c, g, inosine, u, deoxyadenosine, deoxyguanosine, deoxycytidine, deoxyinosine, thymine, ribonebularine, 2'-O-methylnebularine, or 2'-deoxynebularine

SEQ ID NO: 3002 - RNA, 103 nt, synthetic construct; identical to SEQ ID NO: 1796
  source 1..103: mol_type = other RNA
  modified_base 1: mod_base = OTHER; note = 2'-O-Methyl-guanosine phosphorothioate
  modified_base 2: mod_base = OTHER; note = 2'-O-Methyl-adenosine phosphorothioate
  modified_base 3: mod_base = OTHER; note = 2'-O-Methyl-guanosine phosphorothioate
  modified_base 21: mod_base = OTHER; note = 2'-O-Methyl-guanosine
  modified_base 25: mod_base = OTHER; note = uridine phosphorothioate
  modified_base 28: mod_base = OTHER; note = 2'-O-Methyl-adenosine
  modified_base 29: mod_base = OTHER; note = 2'-O-Methyl-guanosine
  modified_base 30: mod_base = OTHER; note = 2'-O-Methyl-cytidine
  modified_base 31: mod_base = OTHER; note = 2'-O-Methyl-uridine
  modified_base 32: mod_base = OTHER; note = 2'-O-Methyl-adenosine
  modified_base 33: mod_base = OTHER; note = 2'-O-Methyl-guanosine
  modified_base 34: mod_base = OTHER; note = 2'-O-Methyl-adenosine
  modified_base 35: mod_base = OTHER; note = 2'-O-Methyl-adenosine
  modified_base 36: mod_base = OTHER; note = 2'-O-Methyl-adenosine
  modified_base 37: mod_base = OTHER; note = 2'-O-Methyl-uridine
  modified_base 38: mod_base = OTHER; note = 2'-O-Methyl-adenosine
  modified_base 39: mod_base = OTHER; note = 2'-O-Methyl-guanosine
  modified_base 40: mod_base = OTHER; note = 2'-O-Methyl-cytidine
  modified_base 41: mod_base = OTHER; note = 2'-O-Methyl-adenosine
  modified_base 42: mod_base = OTHER; note = 2'-O-Methyl-adenosine
  modified_base 46: mod_base = OTHER; note = 2'-O-Methyl-adenosine
  modified_base 48: mod_base = OTHER; note = 2'-O-Methyl-adenosine
  modified_base 50: mod_base = OTHER; note = 2'-O-Methyl-uridine
  modified_base 52: mod_base = OTHER; note = 2'-O-Methyl-adenosine
  modified_base 53: mod_base = OTHER; note = 2'-O-Methyl-guanosine
  modified_base 54: mod_base = OTHER; note = 2'-O-Methyl-guanosine
  modified_base 55: mod_base = OTHER; note = 2'-O-Methyl-cytidine
  modified_base 56: mod_base = OTHER; note = 2'-O-Methyl-uridine
  modified_base 57: mod_base = OTHER; note = 2'-O-Methyl-adenosine
  modified_base 60: mod_base = OTHER; note = 2'-O-Methyl-cytidine
  modified_base 61: mod_base = OTHER; note = 2'-O-Methyl-cytidine
  modified_base 64: mod_base = OTHER; note = uridine phosphorothioate
  modified_base 66: mod_base = OTHER; note = 2'-O-Methyl-uridine
  modified_base 67: mod_base = OTHER; note = 2'-O-Methyl-cytidine
  modified_base 70: mod_base = OTHER; note = 2'-O-Methyl-cytidine
  modified_base 71: mod_base = OTHER; note = 2'-O-Methyl-uridine
  modified_base 72: mod_base = OTHER; note = 2'-O-Methyl-uridine
  modified_base 73: mod_base = OTHER; note = 2'-O-Methyl-guanosine
  modified_base 74: mod_base = OTHER; note = 2'-O-Methyl-adenosine
  modified_base 75: mod_base = OTHER; note = 2'-O-Methyl-adenosine
  modified_base 76: mod_base = OTHER; note = 2'-O-Methyl-adenosine
  modified_base 77: mod_base = OTHER; note = 2'-O-Methyl-adenosine
  modified_base 78: mod_base = OTHER; note = 2'-O-Methyl-adenosine
  modified_base 79: mod_base = OTHER; note = 2'-O-Methyl-guanosine
  modified_base 80: mod_base = OTHER; note = 2'-O-Methyl-uridine
  modified_base 81: mod_base = OTHER; note = 2'-O-Methyl-guanosine
  modified_base 83: mod_base = OTHER; note = 2'-O-Methyl-cytidine
  modified_base 84: mod_base = OTHER; note = 2'-O-Methyl-adenosine
  modified_base 85: mod_base = OTHER; note = 2'-O-Methyl-cytidine
  modified_base 86: mod_base = OTHER; note = 2'-O-Methyl-cytidine
  modified_base 87: mod_base = OTHER; note = 2'-O-Methyl-guanosine
  modified_base 88: mod_base = OTHER; note = 2'-O-Methyl-adenosine
  modified_base 89: mod_base = OTHER; note = 2'-O-Methyl-guanosine
  modified_base 90: mod_base = OTHER; note = 2'-O-Methyl-uridine
  modified_base 91: mod_base = OTHER; note = 2'-O-Methyl-cytidine
  modified_base 92: mod_base = OTHER; note = 2'-O-Methyl-guanosine
  modified_base 93: mod_base = OTHER; note = 2'-O-Methyl-guanosine
  modified_base 94: mod_base = OTHER; note = 2'-O-Methyl-uridine
  modified_base 95: mod_base = OTHER; note = 2'-O-Methyl-guanosine
  modified_base 96: mod_base = OTHER; note = 2'-O-Methyl-cytidine
  modified_base 97: mod_base = OTHER; note = 2'-O-Methyl-uridine
  modified_base 98: mod_base = OTHER; note = 2'-O-Methyl-uridine phosphorothioate
  modified_base 99: mod_base = OTHER; note = 2'-O-Methyl-uridine phosphorothioate
  modified_base 100: mod_base = OTHER; note = 2'-O-Methyl-uridine
  misc_difference 101: note = a, c, g, inosine, u, deoxyadenosine, deoxyguanosine, deoxycytidine, deoxyinosine, thymine, ribonebularine, 2'-O-methylnebularine, or 2'-deoxynebularine
  misc_difference 102: note = a, c, g, inosine, u, deoxyadenosine, deoxyguanosine, deoxycytidine, deoxyinosine, thymine, ribonebularine, 2'-O-methylnebularine, or 2'-deoxynebularine
  misc_difference 103: note = a, c, g, inosine, u, deoxyadenosine, deoxyguanosine, deoxycytidine, deoxyinosine, thymine, ribonebularine, 2'-O-methylnebularine, or 2'-deoxynebularine

SEQ ID NO: 3003 - RNA, 103 nt, synthetic construct; identical to SEQ ID NO: 1796
  source 1..103: mol_type = other RNA
  modified_base 1: mod_base = OTHER; note = 2'-O-Methyl-guanosine phosphorothioate
  modified_base 2: mod_base = OTHER; note = 2'-O-Methyl-adenosine phosphorothioate
  modified_base 3: mod_base = OTHER; note = 2'-O-Methyl-guanosine phosphorothioate
  modified_base 21: mod_base = OTHER; note = 2'-O-Methyl-guanosine
  modified_base 25: mod_base = OTHER; note = uridine phosphorothioate
  modified_base 28: mod_base = OTHER; note = 2'-O-Methyl-adenosine
  modified_base 29: mod_base = OTHER; note = 2'-O-Methyl-guanosine
  modified_base 30: mod_base = OTHER; note = 2'-O-Methyl-cytidine
  modified_base 31: mod_base = OTHER; note = 2'-O-Methyl-uridine
  modified_base 32: mod_base = OTHER; note = 2'-O-Methyl-adenosine
  modified_base 34: mod_base = OTHER; note = 2'-O-Methyl-adenosine
  modified_base 35: mod_base = OTHER; note = 2'-O-Methyl-adenosine
  modified_base 36: mod_base = OTHER; note = 2'-O-Methyl-adenosine
  modified_base 37: mod_base = OTHER; note = 2'-O-Methyl-uridine
  modified_base 38: mod_base = OTHER; note = 2'-O-Methyl-adenosine
  modified_base 39: mod_base = OTHER; note = 2'-O-Methyl-guanosine
  modified_base 40: mod_base = OTHER; note = 2'-O-Methyl-cytidine
  modified_base 41: mod_base = OTHER; note = 2'-O-Methyl-adenosine
  modified_base 42: mod_base = OTHER; note = 2'-O-Methyl-adenosine
  modified_base 46: mod_base = OTHER; note = 2'-O-Methyl-adenosine
  modified_base 48: mod_base = OTHER; note = 2'-O-Methyl-adenosine
  modified_base 50: mod_base = OTHER; note = 2'-O-Methyl-uridine
  modified_base 52: mod_base = OTHER; note = 2'-O-Methyl-adenosine
  modified_base 53: mod_base = OTHER; note = 2'-O-Methyl-guanosine
  modified_base 54: mod_base = OTHER; note = 2'-O-Methyl-guanosine
  modified_base 55: mod_base = OTHER; note = 2'-O-Methyl-cytidine
  modified_base 56: mod_base = OTHER; note = 2'-O-Methyl-uridine
  modified_base 57: mod_base = OTHER; note = 2'-O-Methyl-adenosine
  modified_base 60: mod_base = OTHER; note = 2'-O-Methyl-cytidine
  modified_base 61: mod_base = OTHER; note = 2'-O-Methyl-cytidine
  modified_base 64: mod_base = OTHER; note = uridine phosphorothioate
  modified_base 66: mod_base = OTHER; note = 2'-O-Methyl-uridine
  modified_base 67: mod_base = OTHER; note = 2'-O-Methyl-cytidine
  modified_base 70: mod_base = OTHER; note = 2'-O-Methyl-cytidine
  modified_base 71: mod_base = OTHER; note = 2'-O-Methyl-uridine
  modified_base 72: mod_base = OTHER; note = 2'-O-Methyl-uridine
  modified_base 74: mod_base = OTHER; note = 2'-O-Methyl-adenosine
  modified_base 75: mod_base = OTHER; note = 2'-O-Methyl-adenosine
  modified_base 76: mod_base = OTHER; note = 2'-O-Methyl-adenosine
  modified_base 77: mod_base = OTHER; note = 2'-O-Methyl-adenosine
  modified_base 78: mod_base = OTHER; note = 2'-O-Methyl-adenosine
  modified_base 79: mod_base = OTHER; note = 2'-O-Methyl-guanosine
  modified_base 80: mod_base = OTHER; note = 2'-O-Methyl-uridine
  modified_base 81: mod_base = OTHER; note = 2'-O-Methyl-guanosine
  modified_base 83: mod_base = OTHER; note = 2'-O-Methyl-cytidine
  modified_base 84: mod_base = OTHER; note = 2'-O-Methyl-adenosine
  modified_base 85: mod_base = OTHER; note = 2'-O-Methyl-cytidine
  modified_base 86: mod_base = OTHER; note = 2'-O-Methyl-cytidine
  modified_base 87: mod_base = OTHER; note = 2'-O-Methyl-guanosine
  modified_base 88: mod_base = OTHER; note = 2'-O-Methyl-adenosine
  modified_base 89: mod_base = OTHER; note = 2'-O-Methyl-guanosine
  modified_base 90: mod_base = OTHER; note = 2'-O-Methyl-uridine
  modified_base 91: mod_base = OTHER; note = 2'-O-Methyl-cytidine
  modified_base 92: mod_base = OTHER; note = 2'-O-Methyl-guanosine
  modified_base 93: mod_base = OTHER; note = 2'-O-Methyl-guanosine
  modified_base 94: mod_base = OTHER; note = 2'-O-Methyl-uridine
  modified_base 95: mod_base = OTHER; note = 2'-O-Methyl-guanosine
  modified_base 96: mod_base = OTHER; note = 2'-O-Methyl-cytidine
  modified_base 97: mod_base = OTHER; note = 2'-O-Methyl-uridine
  modified_base 98: mod_base = OTHER; note = 2'-O-Methyl-uridine phosphorothioate
  modified_base 99: mod_base = OTHER; note = 2'-O-Methyl-uridine phosphorothioate
  modified_base 100: mod_base = OTHER; note = 2'-O-Methyl-uridine
  misc_difference 101: note = a, c, g, inosine, u, deoxyadenosine, deoxyguanosine, deoxycytidine, deoxyinosine, thymine, ribonebularine, 2'-O-methylnebularine, or 2'-deoxynebularine
  misc_difference 102: note = a, c, g, inosine, u, deoxyadenosine, deoxyguanosine, deoxycytidine, deoxyinosine, thymine, ribonebularine, 2'-O-methylnebularine, or 2'-deoxynebularine
  misc_difference 103: note = a, c, g, inosine, u, deoxyadenosine, deoxyguanosine, deoxycytidine, deoxyinosine, thymine, ribonebularine, 2'-O-methylnebularine, or 2'-deoxynebularine

SEQ ID NO: 3004 - RNA, 103 nt, synthetic construct; identical to SEQ ID NO: 1797
  source 1..103: mol_type = other RNA
  modified_base 1: mod_base = OTHER; note = 2'-O-Methyl-cytidine phosphorothioate
  modified_base 2: mod_base = OTHER; note = 2'-O-Methyl-adenosine phosphorothioate
  modified_base 3: mod_base = OTHER; note = 2'-O-Methyl-guanosine phosphorothioate
  modified_base 21: mod_base = OTHER; note = 2'-O-Methyl-guanosine
  modified_base 25: mod_base = OTHER; note = uridine phosphorothioate
  modified_base 28: mod_base = OTHER; note = 2'-O-Methyl-adenosine
  modified_base 29: mod_base = OTHER; note = 2'-O-Methyl-guanosine
  modified_base 30: mod_base = OTHER; note = 2'-O-Methyl-cytidine
  modified_base 31: mod_base = OTHER; note = 2'-O-Methyl-uridine
  modified_base 32: mod_base = OTHER; note = 2'-O-Methyl-adenosine
  modified_base 33: mod_base = OTHER; note = 2'-O-Methyl-guanosine
  modified_base 34: mod_base = OTHER; note = 2'-O-Methyl-adenosine
  modified_base 35: mod_base = OTHER; note = 2'-O-Methyl-adenosine
  modified_base 36: mod_base = OTHER; note = 2'-O-Methyl-adenosine
  modified_base 37: mod_base = OTHER; note = 2'-O-Methyl-uridine
  modified_base 38: mod_base = OTHER; note = 2'-O-Methyl-adenosine
  modified_base 39: mod_base = OTHER; note = 2'-O-Methyl-guanosine
  modified_base 40: mod_base = OTHER; note = 2'-O-Methyl-cytidine
  modified_base 41: mod_base = OTHER; note = 2'-O-Methyl-adenosine
  modified_base 42: mod_base = OTHER; note = 2'-O-Methyl-adenosine
  modified_base 46: mod_base = OTHER; note = 2'-O-Methyl-adenosine
  modified_base 48: mod_base = OTHER; note = 2'-O-Methyl-adenosine
  modified_base 50: mod_base = OTHER; note = 2'-O-Methyl-uridine
  modified_base 52: mod_base = OTHER; note = 2'-O-Methyl-adenosine
  modified_base 53: mod_base = OTHER; note = 2'-O-Methyl-guanosine
  modified_base 54: mod_base = OTHER; note = 2'-O-Methyl-guanosine
  modified_base 57: mod_base = OTHER; note = 2'-O-Methyl-adenosine
  modified_base 61: mod_base = OTHER; note = 2'-O-Methyl-cytidine
  modified_base 64: mod_base = OTHER; note = uridine phosphorothioate
  modified_base 66: mod_base = OTHER; note = 2'-O-Methyl-uridine
  modified_base 67: mod_base = OTHER; note = 2'-O-Methyl-cytidine
  modified_base 70: mod_base = OTHER; note = 2'-O-Methyl-cytidine
  modified_base 71: mod_base = OTHER; note = 2'-O-Methyl-uridine
  modified_base 72: mod_base = OTHER; note = 2'-O-Methyl-uridine
  modified_base 74: mod_base = OTHER; note = 2'-O-Methyl-adenosine
  modified_base 75: mod_base = OTHER; note = 2'-O-Methyl-adenosine
  modified_base 76: mod_base = OTHER; note = 2'-O-Methyl-adenosine
  modified_base 77: mod_base = OTHER; note = 2'-O-Methyl-adenosine
  modified_base 78: mod_base = OTHER; note = 2'-O-Methyl-adenosine
  modified_base 79: mod_base = OTHER; note = 2'-O-Methyl-guanosine
  modified_base 80: mod_base = OTHER; note = 2'-O-Methyl-uridine
  modified_base 82: mod_base = OTHER; note = 2'-O-Methyl-guanosine
  modified_base 83: mod_base = OTHER; note = 2'-O-Methyl-cytidine
  modified_base 84: mod_base = OTHER; note = 2'-O-Methyl-adenosine
  modified_base 85: mod_base = OTHER; note = 2'-O-Methyl-cytidine
  modified_base 86: mod_base = OTHER; note = 2'-O-Methyl-cytidine
  modified_base 87: mod_base = OTHER; note = 2'-O-Methyl-guanosine
  modified_base 89: mod_base = OTHER; note = 2'-O-Methyl-guanosine
  modified_base 92: mod_base = OTHER; note = 2'-O-Methyl-guanosine
  modified_base 93: mod_base = OTHER; note = 2'-O-Methyl-guanosine
  modified_base 94: mod_base = OTHER; note = 2'-O-Methyl-uridine
  modified_base 95: mod_base = OTHER; note = 2'-O-Methyl-guanosine
  modified_base 96: mod_base = OTHER; note = 2'-O-Methyl-cytidine
  modified_base 97: mod_base = OTHER; note = 2'-O-Methyl-uridine
  modified_base 98: mod_base = OTHER; note = 2'-O-Methyl-uridine phosphorothioate
  modified_base 99: mod_base = OTHER; note = 2'-O-Methyl-uridine phosphorothioate
  modified_base 100: mod_base = OTHER; note = 2'-O-Methyl-uridine
  misc_difference 101: note = a, c, g, inosine, u, deoxyadenosine, deoxyguanosine, deoxycytidine, deoxyinosine, thymine, ribonebularine, 2'-O-methylnebularine, or 2'-deoxynebularine
  misc_difference 102: note = a, c, g, inosine, u, deoxyadenosine, deoxyguanosine, deoxycytidine, deoxyinosine, thymine, ribonebularine, 2'-O-methylnebularine, or 2'-deoxynebularine
  misc_difference 103: note = a, c, g, inosine, u, deoxyadenosine, deoxyguanosine, deoxycytidine, deoxyinosine, thymine, ribonebularine, 2'-O-methylnebularine, or 2'-deoxynebularine

SEQ ID NO: 3005 - RNA, 103 nt, synthetic construct; identical to SEQ ID NO: 1797
  source 1..103: mol_type = other RNA
  modified_base 1: mod_base = OTHER; note = 2'-O-Methyl-cytidine phosphorothioate
  modified_base 2: mod_base = OTHER; note = 2'-O-Methyl-adenosine phosphorothioate
  modified_base 3: mod_base = OTHER; note = 2'-O-Methyl-guanosine phosphorothioate
  modified_base 21: mod_base = OTHER; note = 2'-O-Methyl-guanosine
  modified_base 25: mod_base = OTHER; note = uridine phosphorothioate
  modified_base 28: mod_base = OTHER; note = 2'-O-Methyl-adenosine
  modified_base 29: mod_base = OTHER; note = 2'-O-Methyl-guanosine
  modified_base 30: mod_base = OTHER; note = 2'-O-Methyl-cytidine
  modified_base 31: mod_base = OTHER; note = 2'-O-Methyl-uridine
  modified_base 32: mod_base = OTHER; note = 2'-O-Methyl-adenosine
  modified_base 33: mod_base = OTHER; note = 2'-O-Methyl-guanosine
  modified_base 34: mod_base = OTHER; note = 2'-O-Methyl-adenosine
  modified_base 35: mod_base = OTHER; note = 2'-O-Methyl-adenosine
  modified_base 36: mod_base = OTHER; note = 2'-O-Methyl-adenosine
  modified_base 37: mod_base = OTHER; note = 2'-O-Methyl-uridine
  modified_base 38: mod_base = OTHER; note = 2'-O-Methyl-adenosine
  modified_base 39: mod_base = OTHER; note = 2'-O-Methyl-guanosine
  modified_base 40: mod_base = OTHER; note = 2'-O-Methyl-cytidine
  modified_base 41: mod_base = OTHER; note = 2'-O-Methyl-adenosine
  modified_base 42: mod_base = OTHER; note = 2'-O-Methyl-adenosine
  modified_base 46: mod_base = OTHER; note = 2'-O-Methyl-adenosine
  modified_base 48: mod_base = OTHER; note = 2'-O-Methyl-adenosine
  modified_base 50: mod_base = OTHER; note = 2'-O-Methyl-uridine
  modified_base 52: mod_base = OTHER; note = 2'-O-Methyl-adenosine
  modified_base 53: mod_base = OTHER; note = 2'-O-Methyl-guanosine
  modified_base 54: mod_base = OTHER; note = 2'-O-Methyl-guanosine
  modified_base 55: mod_base = OTHER; note = 2'-O-Methyl-cytidine
  modified_base 56: mod_base = OTHER; note = 2'-O-Methyl-uridine
  modified_base 57: mod_base = OTHER; note = 2'-O-Methyl-adenosine
  modified_base 60: mod_base = OTHER; note = 2'-O-Methyl-cytidine
  modified_base 61: mod_base = OTHER; note = 2'-O-Methyl-cytidine
  modified_base 64: mod_base = OTHER; note = uridine phosphorothioate
  modified_base 66: mod_base = OTHER; note = 2'-O-Methyl-uridine
  modified_base 67: mod_base = OTHER; note = 2'-O-Methyl-cytidine
  modified_base 70: mod_base = OTHER; note = 2'-O-Methyl-cytidine
  modified_base 71: mod_base = OTHER; note = 2'-O-Methyl-uridine
  modified_base 72: mod_base = OTHER; note = 2'-O-Methyl-uridine
  modified_base 74: mod_base = OTHER; note = 2'-O-Methyl-adenosine
  modified_base 75: mod_base = OTHER; note = 2'-O-Methyl-adenosine
  modified_base 76: mod_base = OTHER; note = 2'-O-Methyl-adenosine
  modified_base 77: mod_base = OTHER; note = 2'-O-Methyl-adenosine
  modified_base 78: mod_base = OTHER; note = 2'-O-Methyl-adenosine
  modified_base 79: mod_base = OTHER; note = 2'-O-Methyl-guanosine
  modified_base 80: mod_base = OTHER; note = 2'-O-Methyl-uridine
  modified_base 82: mod_base = OTHER; note = 2'-O-Methyl-guanosine
  modified_base 83: mod_base = OTHER; note = 2'-O-Methyl-cytidine
  modified_base 84: mod_base = OTHER; note = 2'-O-Methyl-adenosine
  modified_base 85: mod_base = OTHER; note = 2'-O-Methyl-cytidine
  modified_base 86: mod_base = OTHER; note = 2'-O-Methyl-cytidine
  modified_base 87: mod_base = OTHER; note = 2'-O-Methyl-guanosine
  modified_base 89: mod_base = OTHER; note = 2'-O-Methyl-guanosine
  modified_base 92: mod_base = OTHER; note = 2'-O-Methyl-guanosine
  modified_base 93: mod_base = OTHER; note = 2'-O-Methyl-guanosine
  modified_base 94: mod_base = OTHER; note = 2'-O-Methyl-uridine
  modified_base 95: mod_base = OTHER; note = 2'-O-Methyl-guanosine
  modified_base 96: mod_base = OTHER; note = 2'-O-Methyl-cytidine
  modified_base 97: mod_base = OTHER; note = 2'-O-Methyl-uridine
  modified_base 98: mod_base = OTHER; note = 2'-O-Methyl-uridine phosphorothioate
  modified_base 99: mod_base = OTHER; note = 2'-O-Methyl-uridine phosphorothioate
  modified_base 100: mod_base = OTHER; note = 2'-O-Methyl-uridine
  misc_difference 101: note = a, c, g, inosine, u, deoxyadenosine, deoxyguanosine, deoxycytidine, deoxyinosine, thymine, ribonebularine, 2'-O-methylnebularine, or 2'-deoxynebularine
  misc_difference 102: note = a, c, g, inosine, u, deoxyadenosine, deoxyguanosine, deoxycytidine, deoxyinosine, thymine, ribonebularine, 2'-O-methylnebularine, or 2'-deoxynebularine
  misc_difference 103: note = a, c, g, inosine, u, deoxyadenosine, deoxyguanosine, deoxycytidine, deoxyinosine, thymine, ribonebularine, 2'-O-methylnebularine, or 2'-deoxynebularine

SEQ ID NO: 3006 - RNA, 103 nt, synthetic construct; identical to SEQ ID NO: 1797
  source 1..103: mol_type = other RNA
  modified_base 1: mod_base = OTHER; note = 2'-O-Methyl-cytidine phosphorothioate
  modified_base 2: mod_base = OTHER; note = 2'-O-Methyl-adenosine phosphorothioate
  modified_base 3: mod_base = OTHER; note = 2'-O-Methyl-guanosine phosphorothioate
  modified_base 21: mod_base = OTHER; note = 2'-O-Methyl-guanosine
  modified_base 25: mod_base = OTHER; note = uridine phosphorothioate
  modified_base 28: mod_base = OTHER; note = 2'-O-Methyl-adenosine
  modified_base 29: mod_base = OTHER; note = 2'-O-Methyl-guanosine
  modified_base 30: mod_base = OTHER; note = 2'-O-Methyl-cytidine
  modified_base 31: mod_base = OTHER; note = 2'-O-Methyl-uridine
  modified_base 32: mod_base = OTHER; note = 2'-O-Methyl-adenosine
  modified_base 33: mod_base = OTHER; note = 2'-O-Methyl-guanosine
  modified_base 34: mod_base = OTHER; note = 2'-O-Methyl-adenosine
  modified_base 35: mod_base = OTHER; note = 2'-O-Methyl-adenosine
  modified_base 36: mod_base = OTHER; note = 2'-O-Methyl-adenosine
  modified_base 37: mod_base = OTHER; note = 2'-O-Methyl-uridine
  modified_base 38: mod_base = OTHER; note = 2'-O-Methyl-adenosine
  modified_base 39: mod_base = OTHER; note = 2'-O-Methyl-guanosine
  modified_base 40: mod_base = OTHER; note = 2'-O-Methyl-cytidine
  modified_base 41: mod_base = OTHER; note = 2'-O-Methyl-adenosine
  modified_base 42: mod_base = OTHER; note = 2'-O-Methyl-adenosine
  modified_base 46: mod_base = OTHER; note = 2'-O-Methyl-adenosine
  modified_base 48: mod_base = OTHER; note = 2'-O-Methyl-adenosine
  modified_base 50: mod_base = OTHER; note = 2'-O-Methyl-uridine
  modified_base 52: mod_base = OTHER; note = 2'-O-Methyl-adenosine
  modified_base 53: mod_base = OTHER; note = 2'-O-Methyl-guanosine
  modified_base 54: mod_base = OTHER; note = 2'-O-Methyl-guanosine
  modified_base 57: mod_base = OTHER; note = 2'-O-Methyl-adenosine
  modified_base 61: mod_base = OTHER; note = 2'-O-Methyl-cytidine
  modified_base 64: mod_base = OTHER; note = uridine phosphorothioate
  modified_base 66: mod_base = OTHER; note = 2'-O-Methyl-uridine
  modified_base 67: mod_base = OTHER; note = 2'-O-Methyl-cytidine
  modified_base 70: mod_base = OTHER; note = 2'-O-Methyl-cytidine
  modified_base 71: mod_base = OTHER; note = 2'-O-Methyl-uridine
  modified_base 72: mod_base = OTHER; note = 2'-O-Methyl-uridine
  modified_base 73: mod_base = OTHER; note = 2'-O-Methyl-guanosine
  modified_base 74: mod_base = OTHER; note = 2'-O-Methyl-adenosine
  modified_base 75: mod_base = OTHER; note = 2'-O-Methyl-adenosine
  modified_base 76: mod_base = OTHER; note = 2'-O-Methyl-adenosine
  modified_base 77: mod_base = OTHER; note = 2'-O-Methyl-adenosine
  modified_base 78: mod_base = OTHER; note = 2'-O-Methyl-adenosine
  modified_base 79: mod_base = OTHER; note = 2'-O-Methyl-guanosine
  modified_base 80: mod_base = OTHER; note = 2'-O-Methyl-uridine
  modified_base 82: mod_base = OTHER; note = 2'-O-Methyl-guanosine
  modified_base 83: mod_base = OTHER; note = 2'-O-Methyl-cytidine
  modified_base 84: mod_base = OTHER; note = 2'-O-Methyl-adenosine
  modified_base 85: mod_base = OTHER; note = 2'-O-Methyl-cytidine
  modified_base 86: mod_base = OTHER; note = 2'-O-Methyl-cytidine
  modified_base 87: mod_base = OTHER; note = 2'-O-Methyl-guanosine
  modified_base 89: mod_base = OTHER; note = 2'-O-Methyl-guanosine
  modified_base 92: mod_base = OTHER; note = 2'-O-Methyl-guanosine
  modified_base 93: mod_base = OTHER; note = 2'-O-Methyl-guanosine
  modified_base 94: mod_base = OTHER; note = 2'-O-Methyl-uridine
  modified_base 95: mod_base = OTHER; note = 2'-O-Methyl-guanosine
  modified_base 96: mod_base = OTHER; note = 2'-O-Methyl-cytidine
  modified_base 97: mod_base = OTHER; note = 2'-O-Methyl-uridine
  modified_base 98: mod_base = OTHER; note = 2'-O-Methyl-uridine phosphorothioate
  modified_base 99: mod_base = OTHER; note = 2'-O-Methyl-uridine phosphorothioate
  modified_base 100: mod_base = OTHER; note = 2'-O-Methyl-uridine
  misc_difference 101: note = a, c, g, inosine, u, deoxyadenosine, deoxyguanosine, deoxycytidine, deoxyinosine, thymine, ribonebularine, 2'-O-methylnebularine, or 2'-deoxynebularine
  misc_difference 102: note = a, c, g, inosine, u, deoxyadenosine, deoxyguanosine, deoxycytidine, deoxyinosine, thymine, ribonebularine, 2'-O-methylnebularine, or 2'-deoxynebularine
  misc_difference 103: note = a, c, g, inosine, u, deoxyadenosine, deoxyguanosine, deoxycytidine, deoxyinosine, thymine, ribonebularine, 2'-O-methylnebularine, or 2'-deoxynebularine

SEQ ID NO: 3007 - RNA, 103 nt, synthetic construct; identical to SEQ ID NO: 1797
  source 1..103: mol_type = other RNA
  modified_base 1: mod_base = OTHER; note = 2'-O-Methyl-cytidine phosphorothioate
  modified_base 2: mod_base = OTHER; note = 2'-O-Methyl-adenosine phosphorothioate
  modified_base 3: mod_base = OTHER; note = 2'-O-Methyl-guanosine phosphorothioate
  modified_base 21: mod_base = OTHER; note = 2'-O-Methyl-guanosine
  modified_base 25: mod_base = OTHER; note = uridine phosphorothioate
  modified_base 28: mod_base = OTHER; note = 2'-O-Methyl-adenosine
  modified_base 29: mod_base = OTHER; note = 2'-O-Methyl-guanosine
  modified_base 30: mod_base = OTHER; note = 2'-O-Methyl-cytidine
  modified_base 31: mod_base = OTHER; note = 2'-O-Methyl-uridine
  modified_base 32: mod_base = OTHER; note = 2'-O-Methyl-adenosine
  modified_base 33: mod_base = OTHER; note = 2'-O-Methyl-guanosine
  modified_base 34: mod_base = OTHER; note = 2'-O-Methyl-adenosine
  modified_base 35: mod_base = OTHER; note = 2'-O-Methyl-adenosine
  modified_base 36: mod_base = OTHER; note = 2'-O-Methyl-adenosine
  modified_base 37: mod_base = OTHER; note = 2'-O-Methyl-uridine
  modified_base 38: mod_base = OTHER; note = 2'-O-Methyl-adenosine
  modified_base 39: mod_base = OTHER; note = 2'-O-Methyl-guanosine
  modified_base 40: mod_base = OTHER; note = 2'-O-Methyl-cytidine
  modified_base 41: mod_base = OTHER; note = 2'-O-Methyl-adenosine
  modified_base 42: mod_base = OTHER; note = 2'-O-Methyl-adenosine
  modified_base 46: mod_base = OTHER; note = 2'-O-Methyl-adenosine
  modified_base 48: mod_base = OTHER; note = 2'-O-Methyl-adenosine
  modified_base 50: mod_base = OTHER; note = 2'-O-Methyl-uridine
  modified_base 52: mod_base = OTHER; note = 2'-O-Methyl-adenosine
  modified_base 53: mod_base = OTHER; note = 2'-O-Methyl-guanosine
  modified_base 54: mod_base = OTHER; note = 2'-O-Methyl-guanosine
  modified_base 57: mod_base = OTHER; note = 2'-O-Methyl-adenosine
  modified_base 61: mod_base = OTHER; note = 2'-O-Methyl-cytidine
  modified_base 64: mod_base = OTHER; note = uridine phosphorothioate
  modified_base 66: mod_base = OTHER; note = 2'-O-Methyl-uridine
  modified_base 67: mod_base = OTHER; note = 2'-O-Methyl-cytidine
  modified_base 70: mod_base = OTHER; note = 2'-O-Methyl-cytidine
  modified_base 71: mod_base = OTHER; note = 2'-O-Methyl-uridine
  modified_base 72: mod_base = OTHER; note = 2'-O-Methyl-uridine
  modified_base 73: mod_base = OTHER; note = 2'-O-Methyl-guanosine
  modified_base 74: mod_base = OTHER; note = 2'-O-Methyl-adenosine
  modified_base 75: mod_base = OTHER; note = 2'-O-Methyl-adenosine
  modified_base 76: mod_base = OTHER; note = 2'-O-Methyl-adenosine
  modified_base 77: mod_base = OTHER; note = 2'-O-Methyl-adenosine
  modified_base 78: mod_base = OTHER; note = 2'-O-Methyl-adenosine
  modified_base 79: mod_base = OTHER; note = 2'-O-Methyl-guanosine
  modified_base 80: mod_base = OTHER; note = 2'-O-Methyl-uridine
  modified_base 82: mod_base = OTHER; note = 2'-O-Methyl-guanosine
  modified_base 83: mod_base = OTHER; note = 2'-O-Methyl-cytidine
  modified_base 84: mod_base = OTHER; note = 2'-O-Methyl-adenosine
  modified_base 85: mod_base = OTHER; note = 2'-O-Methyl-cytidine
  modified_base 86: mod_base = OTHER; note = 2'-O-Methyl-cytidine
  modified_base 87: mod_base = OTHER; note = 2'-O-Methyl-guanosine
  modified_base 89: mod_base = OTHER; note = 2'-O-Methyl-guanosine
  modified_base 91: mod_base = OTHER; note = 2'-O-Methyl-cytidine
  modified_base 92: mod_base = OTHER; note = 2'-O-Methyl-guanosine
  modified_base 93: mod_base = OTHER; note = 2'-O-Methyl-guanosine
  modified_base 94: mod_base = OTHER; note = 2'-O-Methyl-uridine
  modified_base 95: mod_base = OTHER; note = 2'-O-Methyl-guanosine
  modified_base 96: mod_base = OTHER; note = 2'-O-Methyl-cytidine
  modified_base 97: mod_base = OTHER; note = 2'-O-Methyl-uridine
  modified_base 98: mod_base = OTHER; note = 2'-O-Methyl-uridine phosphorothioate
  modified_base 99: mod_base = OTHER; note = 2'-O-Methyl-uridine phosphorothioate
  modified_base 100: mod_base = OTHER; note = 2'-O-Methyl-uridine
  misc_difference 101: note = a, c, g, inosine, u, deoxyadenosine, deoxyguanosine, deoxycytidine, deoxyinosine, thymine, ribonebularine, 2'-O-methylnebularine, or 2'-deoxynebularine
  misc_difference 102: note = a, c, g, inosine, u, deoxyadenosine, deoxyguanosine, deoxycytidine, deoxyinosine, thymine, ribonebularine, 2'-O-methylnebularine, or 2'-deoxynebularine
  misc_difference 103: note = a, c, g, inosine, u, deoxyadenosine, deoxyguanosine, deoxycytidine, deoxyinosine, thymine, ribonebularine, 2'-O-methylnebularine, or 2'-deoxynebularine

SEQ ID NO: 3008 - RNA, 103 nt, synthetic construct; identical to SEQ ID NO: 1797
  source 1..103: mol_type = other RNA
  modified_base 1: mod_base = OTHER; note = 2'-O-Methyl-cytidine phosphorothioate
  modified_base 2: mod_base = OTHER; note = 2'-O-Methyl-adenosine phosphorothioate
  modified_base 3: mod_base = OTHER; note = 2'-O-Methyl-guanosine phosphorothioate
  modified_base 21: mod_base = OTHER; note = 2'-O-Methyl-guanosine
  modified_base 25: mod_base = OTHER; note = uridine phosphorothioate
  modified_base 28: mod_base = OTHER; note = 2'-O-Methyl-adenosine
  modified_base 29: mod_base = OTHER; note = 2'-O-Methyl-guanosine
  modified_base 30: mod_base = OTHER; note = 2'-O-Methyl-cytidine
  modified_base 31: mod_base = OTHER; note = 2'-O-Methyl-uridine
  modified_base 32: mod_base = OTHER; note = 2'-O-Methyl-adenosine
  modified_base 34: mod_base = OTHER; note = 2'-O-Methyl-adenosine
  modified_base 35: mod_base = OTHER; note = 2'-O-Methyl-adenosine
  modified_base 36: mod_base = OTHER; note = 2'-O-Methyl-adenosine
  modified_base 37: mod_base = OTHER; note = 2'-O-Methyl-uridine
  modified_base 38: mod_base = OTHER; note = 2'-O-Methyl-adenosine
  modified_base 39: mod_base = OTHER; note = 2'-O-Methyl-guanosine
  modified_base 40: mod_base = OTHER; note = 2'-O-Methyl-cytidine
  modified_base 41: mod_base = OTHER; note = 2'-O-Methyl-adenosine
  modified_base 42: mod_base = OTHER; note = 2'-O-Methyl-adenosine
  modified_base 46: mod_base = OTHER; note = 2'-O-Methyl-adenosine
  modified_base 48: mod_base = OTHER; note = 2'-O-Methyl-adenosine
  modified_base 50: mod_base = OTHER; note = 2'-O-Methyl-uridine
  modified_base 52: mod_base = OTHER; note = 2'-O-Methyl-adenosine
  modified_base 53: mod_base = OTHER; note = 2'-O-Methyl-guanosine
  modified_base 54: mod_base = OTHER; note = 2'-O-Methyl-guanosine
  modified_base 57: mod_base = OTHER; note = 2'-O-Methyl-adenosine
  modified_base 61: mod_base = OTHER; note = 2'-O-Methyl-cytidine
  modified_base 64: mod_base = OTHER; note = uridine phosphorothioate
  modified_base 66: mod_base = OTHER; note = 2'-O-Methyl-uridine
  modified_base 67: mod_base = OTHER; note = 2'-O-Methyl-cytidine
  modified_base 70: mod_base = OTHER; note = 2'-O-Methyl-cytidine
  modified_base 71: mod_base = OTHER; note = 2'-O-Methyl-uridine
  modified_base 72: mod_base = OTHER; note = 2'-O-Methyl-uridine
  modified_base 73: mod_base = OTHER; note = 2'-O-Methyl-guanosine
  modified_base 74: mod_base = OTHER; note = 2'-O-Methyl-adenosine
  modified_base 75: mod_base = OTHER; note = 2'-O-Methyl-adenosine
  modified_base 76: mod_base = OTHER; note = 2'-O-Methyl-adenosine
  modified_base 77: mod_base = OTHER; note = 2'-O-Methyl-adenosine
  modified_base 78: mod_base = OTHER; note = 2'-O-Methyl-adenosine
  modified_base 79: mod_base = OTHER; note = 2'-O-Methyl-guanosine
  modified_base 80: mod_base = OTHER; note = 2'-O-Methyl-uridine
  modified_base 82: mod_base = OTHER; note = 2'-O-Methyl-guanosine
  modified_base 83: mod_base = OTHER; note = 2'-O-Methyl-cytidine
  modified_base 84: mod_base = OTHER; note = 2'-O-Methyl-adenosine
  modified_base 85: mod_base = OTHER; note = 2'-O-Methyl-cytidine
  modified_base 86: mod_base = OTHER; note = 2'-O-Methyl-cytidine
  modified_base 87: mod_base = OTHER; note = 2'-O-Methyl-guanosine
  modified_base 89: mod_base = OTHER; note = 2'-O-Methyl-guanosine
  modified_base 92: mod_base = OTHER; note = 2'-O-Methyl-guanosine
  modified_base 93: mod_base = OTHER; note = 2'-O-Methyl-guanosine
  modified_base 94: mod_base = OTHER; note = 2'-O-Methyl-uridine
  modified_base 95: mod_base = OTHER; note = 2'-O-Methyl-guanosine
  modified_base 96: mod_base = OTHER; note = 2'-O-Methyl-cytidine
  modified_base 97: mod_base = OTHER; note = 2'-O-Methyl-uridine
  modified_base 98: mod_base = OTHER; note = 2'-O-Methyl-uridine phosphorothioate
  modified_base 99: mod_base = OTHER; note = 2'-O-Methyl-uridine phosphorothioate
  modified_base 100: mod_base = OTHER; note = 2'-O-Methyl-uridine
  misc_difference 101: note = a, c, g, inosine, u, deoxyadenosine, deoxyguanosine, deoxycytidine, deoxyinosine, thymine, ribonebularine, 2'-O-methylnebularine, or 2'-deoxynebularine
  misc_difference 102: note = a, c, g, inosine, u, deoxyadenosine, deoxyguanosine, deoxycytidine, deoxyinosine, thymine, ribonebularine, 2'-O-methylnebularine, or 2'-deoxynebularine
  misc_difference 103: note = a, c, g, inosine, u, deoxyadenosine, deoxyguanosine, deoxycytidine, deoxyinosine, thymine, ribonebularine, 2'-O-methylnebularine, or 2'-deoxynebularine

SEQ ID NO: 3009 - RNA, 103 nt, synthetic construct; identical to SEQ ID NO: 1797
  source 1..103: mol_type = other RNA
  modified_base 1: mod_base = OTHER; note = 2'-O-Methyl-cytidine phosphorothioate
  modified_base 2: mod_base = OTHER; note = 2'-O-Methyl-adenosine phosphorothioate
  modified_base 3: mod_base = OTHER; note = 2'-O-Methyl-guanosine phosphorothioate
  modified_base 21: mod_base = OTHER; note = 2'-O-Methyl-guanosine
  modified_base 25: mod_base = OTHER; note = uridine phosphorothioate
  modified_base 28: mod_base = OTHER; note = 2'-O-Methyl-adenosine
  modified_base 29: mod_base = OTHER; note = 2'-O-Methyl-guanosine
  modified_base 30: mod_base = OTHER; note = 2'-O-Methyl-cytidine
  modified_base 31: mod_base = OTHER; note = 2'-O-Methyl-uridine
  modified_base 32: mod_base = OTHER; note = 2'-O-Methyl-adenosine
  modified_base 34: mod_base = OTHER; note = 2'-O-Methyl-adenosine
  modified_base 35: mod_base = OTHER; note = 2'-O-Methyl-adenosine
  modified_base 36: mod_base = OTHER; note = 2'-O-Methyl-adenosine
  modified_base 37: mod_base = OTHER; note = 2'-O-Methyl-uridine
  modified_base 38: mod_base = OTHER; note = 2'-O-Methyl-adenosine
  modified_base 39: mod_base = OTHER; note = 2'-O-Methyl-guanosine
  modified_base 40: mod_base = OTHER; note = 2'-O-Methyl-cytidine
  modified_base 41: mod_base = OTHER; note = 2'-O-Methyl-adenosine
  modified_base 42: mod_base = OTHER; note = 2'-O-Methyl-adenosine
  modified_base 46: mod_base = OTHER; note = 2'-O-Methyl-adenosine
  modified_base 48: mod_base = OTHER; note = 2'-O-Methyl-adenosine
  modified_base 50: mod_base = OTHER; note = 2'-O-Methyl-uridine
  modified_base 52: mod_base = OTHER; note = 2'-O-Methyl-adenosine
  modified_base 53: mod_base = OTHER; note = 2'-O-Methyl-guanosine
  modified_base 54: mod_base = OTHER; note = 2'-O-Methyl-guanosine
  modified_base 57: mod_base = OTHER; note = 2'-O-Methyl-adenosine
  modified_base 61: mod_base = OTHER; note = 2'-O-Methyl-cytidine
  modified_base 64: mod_base = OTHER; note = uridine phosphorothioate
  modified_base 66: mod_base = OTHER; note = 2'-O-Methyl-uridine
  modified_base 67: mod_base = OTHER; note = 2'-O-Methyl-cytidine
  modified_base 70: mod_base = OTHER; note = 2'-O-Methyl-cytidine
  modified_base 71: mod_base = OTHER; note = 2'-O-Methyl-uridine
  modified_base 72: mod_base = OTHER; note = 2'-O-Methyl-uridine
  modified_base 73: mod_base = OTHER; note = 2'-O-Methyl-guanosine
  modified_base 74: mod_base = OTHER; note = 2'-O-Methyl-adenosine
  modified_base 75: mod_base = OTHER; note = 2'-O-Methyl-adenosine
  modified_base 76: mod_base = OTHER; note = 2'-O-Methyl-adenosine
  modified_base 77: mod_base = OTHER; note = 2'-O-Methyl-adenosine
  modified_base 78: mod_base = OTHER; note = 2'-O-Methyl-adenosine
  modified_base 79: mod_base = OTHER; note = 2'-O-Methyl-guanosine
  modified_base 80: mod_base = OTHER; note = 2'-O-Methyl-uridine
  modified_base 82: mod_base = OTHER; note = 2'-O-Methyl-guanosine
  modified_base 83: mod_base = OTHER; note = 2'-O-Methyl-cytidine
  modified_base 84: mod_base = OTHER; note = 2'-O-Methyl-adenosine
  modified_base 85: mod_base = OTHER; note = 2'-O-Methyl-cytidine
  modified_base 86: mod_base = OTHER; note = 2'-O-Methyl-cytidine
  modified_base 87: mod_base = OTHER; note = 2'-O-Methyl-guanosine
  modified_base 89: mod_base = OTHER; note = 2'-O-Methyl-guanosine
  modified_base 91: mod_base = OTHER; note = 2'-O-Methyl-cytidine
  modified_base 92: mod_base = OTHER; note = 2'-O-Methyl-guanosine
  modified_base 93: mod_base = OTHER; note = 2'-O-Methyl-guanosine
  modified_base 94: mod_base = OTHER; note = 2'-O-Methyl-uridine
  modified_base 95: mod_base = OTHER; note = 2'-O-Methyl-guanosine
  modified_base 96: mod_base = OTHER; note = 2'-O-Methyl-cytidine
  modified_base 97: mod_base = OTHER; note = 2'-O-Methyl-uridine
  modified_base 98: mod_base = OTHER; note = 2'-O-Methyl-uridine phosphorothioate
  modified_base 99: mod_base = OTHER; note = 2'-O-Methyl-uridine phosphorothioate
  modified_base 100: mod_base = OTHER; note = 2'-O-Methyl-uridine
  misc_difference 101: note = a, c, g, inosine, u, deoxyadenosine, deoxyguanosine, deoxycytidine, deoxyinosine, thymine, ribonebularine, 2'-O-methylnebularine, or 2'-deoxynebularine
  misc_difference 102: note = a, c, g, inosine, u, deoxyadenosine, deoxyguanosine, deoxycytidine, deoxyinosine, thymine, ribonebularine, 2'-O-methylnebularine, or 2'-deoxynebularine
  misc_difference 103: note = a, c, g, inosine, u, deoxyadenosine, deoxyguanosine, deoxycytidine, deoxyinosine, thymine, ribonebularine, 2'-O-methylnebularine, or 2'-deoxynebularine

SEQ ID NO: 3010 - RNA, 103 nt, synthetic construct; identical to SEQ ID NO: 1797
  source 1..103: mol_type = other RNA
  modified_base 1: mod_base = OTHER; note = 2'-O-Methyl-cytidine phosphorothioate
  modified_base 2: mod_base = OTHER; note = 2'-O-Methyl-adenosine phosphorothioate
  modified_base 3: mod_base = OTHER; note = 2'-O-Methyl-guanosine phosphorothioate
  modified_base 21: mod_base = OTHER; note = 2'-O-Methyl-guanosine
  modified_base 25: mod_base = OTHER; note = uridine phosphorothioate
  modified_base 28: mod_base = OTHER; note = 2'-O-Methyl-adenosine
  modified_base 29: mod_base = OTHER; note = 2'-O-Methyl-guanosine
  modified_base 30: mod_base = OTHER; note = 2'-O-Methyl-cytidine
  modified_base 31: mod_base = OTHER; note = 2'-O-Methyl-uridine
  modified_base 32: mod_base = OTHER; note = 2'-O-Methyl-adenosine
  modified_base 34: mod_base = OTHER; note = 2'-O-Methyl-adenosine
  modified_base 35: mod_base = OTHER; note = 2'-O-Methyl-adenosine
  modified_base 36: mod_base = OTHER; note = 2'-O-Methyl-adenosine
  modified_base 37: mod_base = OTHER; note = 2'-O-Methyl-uridine
  modified_base 38: mod_base = OTHER; note = 2'-O-Methyl-adenosine
  modified_base 39: mod_base = OTHER; note = 2'-O-Methyl-guanosine
  modified_base 40: mod_base = OTHER; note = 2'-O-Methyl-cytidine
  modified_base 41: mod_base = OTHER; note = 2'-O-Methyl-adenosine
  modified_base 42: mod_base = OTHER; note = 2'-O-Methyl-adenosine
  modified_base 46: mod_base = OTHER; note = 2'-O-Methyl-adenosine
  modified_base 48: mod_base = OTHER; note = 2'-O-Methyl-adenosine
  modified_base 50: mod_base = OTHER; note = 2'-O-Methyl-uridine
  modified_base 52: mod_base = OTHER; note = 2'-O-Methyl-adenosine
  modified_base 53: mod_base = OTHER; note = 2'-O-Methyl-guanosine
  modified_base 54: mod_base = OTHER; note = 2'-O-Methyl-guanosine
  modified_base 55: mod_base = OTHER; note = 2'-O-Methyl-cytidine
  modified_base 56: mod_base = OTHER; note = 2'-O-Methyl-uridine
  modified_base 57: mod_base = OTHER; note = 2'-O-Methyl-adenosine
  modified_base 60: mod_base = OTHER; note = 2'-O-Methyl-cytidine
  modified_base 61: mod_base = OTHER; note = 2'-O-Methyl-cytidine
  modified_base 64: mod_base = OTHER; note = uridine phosphorothioate
  modified_base 66: mod_base = OTHER; note = 2'-O-Methyl-uridine
  modified_base 67: mod_base = OTHER; note = 2'-O-Methyl-cytidine
  modified_base 70: mod_base = OTHER; note = 2'-O-Methyl-cytidine
  modified_base 71: mod_base = OTHER; note = 2'-O-Methyl-uridine
  modified_base 72: mod_base = OTHER; note = 2'-O-Methyl-uridine
  modified_base 74: mod_base = OTHER; note = 2'-O-Methyl-adenosine
  modified_base 75: mod_base = OTHER; note = 2'-O-Methyl-adenosine
  modified_base 76: mod_base = OTHER; note = 2'-O-Methyl-adenosine
  modified_base 77: mod_base = OTHER; note = 2'-O-Methyl-adenosine
  modified_base 78: mod_base = OTHER; note = 2'-O-Methyl-adenosine
  modified_base 79: mod_base = OTHER; note = 2'-O-Methyl-guanosine
  modified_base 80: mod_base = OTHER; note = 2'-O-Methyl-uridine
  modified_base 82: mod_base = OTHER; note = 2'-O-Methyl-guanosine
  modified_base 83: mod_base = OTHER; note = 2'-O-Methyl-cytidine
  modified_base 84: mod_base = OTHER; note = 2'-O-Methyl-adenosine
  modified_base 85: mod_base = OTHER; note = 2'-O-Methyl-cytidine
  modified_base 86: mod_base = OTHER; note = 2'-O-Methyl-cytidine
  modified_base 87: mod_base = OTHER; note = 2'-O-Methyl-guanosine
  modified_base 89: mod_base = OTHER; note = 2'-O-Methyl-guanosine
  modified_base 92: mod_base = OTHER; note = 2'-O-Methyl-guanosine
  modified_base 93: mod_base = OTHER; note = 2'-O-Methyl-guanosine
  modified_base 94: mod_base = OTHER; note = 2'-O-Methyl-uridine
  modified_base 95: mod_base = OTHER; note = 2'-O-Methyl-guanosine
  modified_base 96: mod_base = OTHER; note = 2'-O-Methyl-cytidine
  modified_base 97: mod_base = OTHER; note = 2'-O-Methyl-uridine
  modified_base 98: mod_base = OTHER; note = 2'-O-Methyl-uridine phosphorothioate
  modified_base 99: mod_base = OTHER; note = 2'-O-Methyl-uridine phosphorothioate
  modified_base 100: mod_base = OTHER; note = 2'-O-Methyl-uridine
  misc_difference 101: note = a, c, g, inosine, u, deoxyadenosine, deoxyguanosine, deoxycytidine, deoxyinosine, thymine, ribonebularine, 2'-O-methylnebularine, or 2'-deoxynebularine
  misc_difference 102: note = a, c, g, inosine, u, deoxyadenosine, deoxyguanosine, deoxycytidine, deoxyinosine, thymine, ribonebularine, 2'-O-methylnebularine, or 2'-deoxynebularine
  misc_difference 103: note = a, c, g, inosine, u, deoxyadenosine, deoxyguanosine, deoxycytidine, deoxyinosine, thymine, ribonebularine, 2'-O-methylnebularine, or 2'-deoxynebularine

SEQ ID NO: 3011 - RNA, 103 nt, synthetic construct; identical to SEQ ID NO: 1795
  source 1..103: mol_type = other RNA
  modified_base 1: mod_base = OTHER; note = 2'-O-Methyl-cytidine phosphorothioate
  modified_base 2: mod_base = OTHER; note = 2'-O-Methyl-cytidine phosphorothioate
  modified_base 3: mod_base = OTHER; note = 2'-O-Methyl-cytidine phosphorothioate
  modified_base 21: mod_base = OTHER; note = 2'-O-Methyl-guanosine
  modified_base 25: mod_base = OTHER; note = uridine phosphorothioate
  modified_base 28: mod_base = OTHER; note = 2'-O-Methyl-adenosine
  modified_base 29: mod_base = OTHER; note = 2'-O-Methyl-guanosine
  modified_base 30: mod_base = OTHER; note = 2'-O-Methyl-cytidine
  modified_base 31: mod_base = OTHER; note = 2'-O-Methyl-uridine
  modified_base 32: mod_base = OTHER; note = 2'-O-Methyl-adenosine
  modified_base 33: mod_base = OTHER; note = 2'-O-Methyl-guanosine
  modified_base 34: mod_base = OTHER; note = 2'-O-Methyl-adenosine
  modified_base 35: mod_base = OTHER; note = 2'-O-Methyl-adenosine
  modified_base 36: mod_base = OTHER; note = 2'-O-Methyl-adenosine
  modified_base 37: mod_base = OTHER; note = 2'-O-Methyl-uridine
  modified_base 38: mod_base = OTHER; note = 2'-O-Methyl-adenosine
  modified_base 39: mod_base = OTHER; note = 2'-O-Methyl-guanosine
  modified_base 40: mod_base = OTHER; note = 2'-O-Methyl-cytidine
  modified_base 41: mod_base = OTHER; note = 2'-O-Methyl-adenosine
  modified_base 42: mod_base = OTHER; note = 2'-O-Methyl-adenosine
  modified_base 45: mod_base = OTHER; note = uridine phosphorothioate
  modified_base 46: mod_base = OTHER; note = 2'-O-Methyl-adenosine
  modified_base 48: mod_base = OTHER; note = 2'-O-Methyl-adenosine
  modified_base 50: mod_base = OTHER; note = 2'-O-Methyl-uridine
  modified_base 52: mod_base = OTHER; note = 2'-O-Methyl-adenosine
  modified_base 53: mod_base = OTHER; note = 2'-O-Methyl-guanosine
  modified_base 54: mod_base = OTHER; note = 2'-O-Methyl-guanosine
  modified_base 55: mod_base = OTHER; note = 2'-O-Methyl-cytidine
  modified_base 56: mod_base = OTHER; note = 2'-O-Methyl-uridine
  modified_base 57: mod_base = OTHER; note = 2'-O-Methyl-adenosine
  modified_base 60: mod_base = OTHER; note = 2'-O-Methyl-cytidine
  modified_base 61: mod_base = OTHER; note = 2'-O-Methyl-cytidine
  modified_base 64: mod_base = OTHER; note = uridine phosphorothioate
  modified_base 66: mod_base = OTHER; note = 2'-O-Methyl-uridine
  modified_base 67: mod_base = OTHER; note = 2'-O-Methyl-cytidine
  modified_base 70: mod_base = OTHER; note = 2'-O-Methyl-cytidine
  modified_base 71: mod_base = OTHER; note = 2'-O-Methyl-uridine
  modified_base 72: mod_base = OTHER; note = 2'-O-Methyl-uridine
  modified_base 73: mod_base = OTHER; note = 2'-O-Methyl-guanosine
  modified_base 74: mod_base = OTHER; note = 2'-O-Methyl-adenosine
  modified_base 75: mod_base = OTHER; note = 2'-O-Methyl-adenosine
  modified_base 76: mod_base = OTHER; note = 2'-O-Methyl-adenosine
  modified_base 77: mod_base = OTHER; note = 2'-O-Methyl-adenosine
  modified_base 78: mod_base = OTHER; note = 2'-O-Methyl-adenosine
  modified_base 79: mod_base = OTHER; note = 2'-O-Methyl-guanosine
  modified_base 80: mod_base = OTHER; note = 2'-O-Methyl-uridine
  modified_base 81: mod_base = OTHER; note = 2'-O-Methyl-guanosine
  modified_base 83: mod_base = OTHER; note = 2'-O-Methyl-cytidine
  modified_base 84: mod_base = OTHER; note = 2'-O-Methyl-adenosine
  modified_base 85: mod_base = OTHER; note = 2'-O-Methyl-cytidine
  modified_base 86: mod_base = OTHER; note = 2'-O-Methyl-cytidine
  modified_base 87: mod_base = OTHER; note = 2'-O-Methyl-guanosine
  modified_base 88: mod_base = OTHER; note = 2'-O-Methyl-adenosine
  modified_base 89: mod_base = OTHER; note = 2'-O-Methyl-guanosine
  modified_base 90: mod_base = OTHER; note = 2'-O-Methyl-uridine
  modified_base 91: mod_base = OTHER; note = 2'-O-Methyl-cytidine
  modified_base 92: mod_base = OTHER; note = 2'-O-Methyl-guanosine
  modified_base 93: mod_base = OTHER; note = 2'-O-Methyl-guanosine
  modified_base 94: mod_base = OTHER; note = 2'-O-Methyl-uridine
  modified_base 95: mod_base = OTHER; note = 2'-O-Methyl-guanosine
  modified_base 96: mod_base = OTHER; note = 2'-O-Methyl-cytidine
  modified_base 97: mod_base = OTHER; note = 2'-O-Methyl-uridine
  modified_base 98: mod_base = OTHER; note = 2'-O-Methyl-uridine phosphorothioate
  modified_base 99: mod_base = OTHER; note = 2'-O-Methyl-uridine phosphorothioate
  modified_base 100: mod_base = OTHER; note = 2'-O-Methyl-uridine
  misc_difference 101: note = a, c, g, inosine, u, deoxyadenosine, deoxyguanosine, deoxycytidine, deoxyinosine, thymine, ribonebularine, 2'-O-methylnebularine, or 2'-deoxynebularine
  misc_difference 102: note = a, c, g, inosine, u, deoxyadenosine, deoxyguanosine, deoxycytidine, deoxyinosine, thymine, ribonebularine, 2'-O-methylnebularine, or 2'-deoxynebularine
  misc_difference 103: note = a, c, g, inosine, u, deoxyadenosine, deoxyguanosine, deoxycytidine, deoxyinosine, thymine, ribonebularine, 2'-O-methylnebularine, or 2'-deoxynebularine

SEQ ID NO: 3012 - RNA, 103 nt, synthetic construct; identical to SEQ ID NO: 1795
  source 1..103: mol_type = other RNA
  modified_base 1: mod_base = OTHER; note = 2'-O-Methyl-cytidine phosphorothioate
  modified_base 2: mod_base = OTHER; note = 2'-O-Methyl-cytidine phosphorothioate
  modified_base 3: mod_base = OTHER; note = 2'-O-Methyl-cytidine phosphorothioate
  modified_base 21: mod_base = OTHER; note = 2'-O-Methyl-guanosine
  modified_base 25: mod_base = OTHER; note = uridine phosphorothioate
  modified_base 28: mod_base = OTHER; note = 2'-O-Methyl-adenosine
  modified_base 29: mod_base = OTHER; note = 2'-O-Methyl-guanosine
  modified_base 30: mod_base = OTHER; note = 2'-O-Methyl-cytidine
  modified_base 31: mod_base = OTHER; note = 2'-O-Methyl-uridine
  modified_base 32: mod_base = OTHER; note = 2'-O-Methyl-adenosine
  modified_base 34: mod_base = OTHER; note = 2'-O-Methyl-adenosine
  modified_base 35: mod_base = OTHER; note = 2'-O-Methyl-adenosine
  modified_base 36: mod_base = OTHER; note = 2'-O-Methyl-adenosine
  modified_base 37: mod_base = OTHER; note = 2'-O-Methyl-uridine
  modified_base 38: mod_base = OTHER; note = 2'-O-Methyl-adenosine
  modified_base 39: mod_base = OTHER; note = 2'-O-Methyl-guanosine
  modified_base 40: mod_base = OTHER; note = 2'-O-Methyl-cytidine
  modified_base 41: mod_base = OTHER; note = 2'-O-Methyl-adenosine
  modified_base 42: mod_base = OTHER; note = 2'-O-Methyl-adenosine
  modified_base 45: mod_base = OTHER; note = uridine phosphorothioate
  modified_base 46: mod_base = OTHER; note = 2'-O-Methyl-adenosine
  modified_base 48: mod_base = OTHER; note = 2'-O-Methyl-adenosine
  modified_base 50: mod_base = OTHER; note = 2'-O-Methyl-uridine
  modified_base 52: mod_base = OTHER; note = 2'-O-Methyl-adenosine
  modified_base 53: mod_base = OTHER; note = 2'-O-Methyl-guanosine
  modified_base 54: mod_base = OTHER; note = 2'-O-Methyl-guanosine
  modified_base 55: mod_base = OTHER; note = 2'-O-Methyl-cytidine
  modified_base 56: mod_base = OTHER; note = 2'-O-Methyl-uridine
  modified_base 57: mod_base = OTHER; note = 2'-O-Methyl-adenosine
  modified_base 60: mod_base = OTHER; note = 2'-O-Methyl-cytidine
  modified_base 61: mod_base = OTHER; note = 2'-O-Methyl-cytidine
  modified_base 64: mod_base = OTHER; note = uridine phosphorothioate
  modified_base 66: mod_base = OTHER; note = 2'-O-Methyl-uridine
  modified_base 67: mod_base = OTHER; note = 2'-O-Methyl-cytidine
  modified_base 70: mod_base = OTHER; note = 2'-O-Methyl-cytidine
  modified_base 71: mod_base = OTHER; note = 2'-O-Methyl-uridine
  modified_base 72: mod_base = OTHER; note = 2'-O-Methyl-uridine
  modified_base 74: mod_base = OTHER; note = 2'-O-Methyl-adenosine
  modified_base 75: mod_base = OTHER; note = 2'-O-Methyl-adenosine
  modified_base 76: mod_base = OTHER; note = 2'-O-Methyl-adenosine
  modified_base 77: mod_base = OTHER; note = 2'-O-Methyl-adenosine
  modified_base 78: mod_base = OTHER; note = 2'-O-Methyl-adenosine
  modified_base 79: mod_base = OTHER; note = 2'-O-Methyl-guanosine
  modified_base 80: mod_base = OTHER; note = 2'-O-Methyl-uridine
  modified_base 81: mod_base = OTHER; note = 2'-O-Methyl-guanosine
  modified_base 83: mod_base = OTHER; note = 2'-O-Methyl-cytidine
  modified_base 84: mod_base = OTHER; note = 2'-O-Methyl-adenosine
  modified_base 85: mod_base = OTHER; note = 2'-O-Methyl-cytidine
  modified_base 86: mod_base = OTHER; note = 2'-O-Methyl-cytidine
  modified_base 87: mod_base = OTHER; note = 2'-O-Methyl-guanosine
  modified_base 88: mod_base = OTHER; note = 2'-O-Methyl-adenosine
  modified_base 89: mod_base = OTHER; note = 2'-O-Methyl-guanosine
  modified_base 90: mod_base = OTHER; note = 2'-O-Methyl-uridine
  modified_base 91: mod_base = OTHER; note = 2'-O-Methyl-cytidine
  modified_base 92: mod_base = OTHER; note = 2'-O-Methyl-guanosine
  modified_base 93: mod_base = OTHER; note = 2'-O-Methyl-guanosine
  modified_base 94: mod_base = OTHER; note = 2'-O-Methyl-uridine
  modified_base 95: mod_base = OTHER; note = 2'-O-Methyl-guanosine
  modified_base 96: mod_base = OTHER; note = 2'-O-Methyl-cytidine
  modified_base 97: mod_base = OTHER; note = 2'-O-Methyl-uridine
  modified_base 98: mod_base = OTHER; note = 2'-O-Methyl-uridine phosphorothioate
  modified_base 99: mod_base = OTHER; note = 2'-O-Methyl-uridine phosphorothioate
  modified_base 100: mod_base = OTHER; note = 2'-O-Methyl-uridine
  misc_difference 101: note = a, c, g, inosine, u, deoxyadenosine, deoxyguanosine, deoxycytidine, deoxyinosine, thymine, ribonebularine, 2'-O-methylnebularine, or 2'-deoxynebularine
  misc_difference 102: note = a, c, g, inosine, u, deoxyadenosine, deoxyguanosine, deoxycytidine, deoxyinosine, thymine, ribonebularine, 2'-O-methylnebularine, or 2'-deoxynebularine
  misc_difference 103: note = a, c, g, inosine, u, deoxyadenosine, deoxyguanosine, deoxycytidine, deoxyinosine, thymine, ribonebularine, 2'-O-methylnebularine, or 2'-deoxynebularine

SEQ ID NO: 3013 - RNA, 103 nt, synthetic construct; identical to SEQ ID NO: 1796
  source 1..103: mol_type = other RNA
  modified_base 1: mod_base = OTHER; note = 2'-O-Methyl-guanosine phosphorothioate
  modified_base 2: mod_base = OTHER; note = 2'-O-Methyl-adenosine phosphorothioate
  modified_base 3: mod_base = OTHER; note = 2'-O-Methyl-guanosine phosphorothioate
  modified_base 21: mod_base = OTHER; note = 2'-O-Methyl-guanosine
  modified_base 25: mod_base = OTHER; note = uridine phosphorothioate
  modified_base 28: mod_base = OTHER; note = 2'-O-Methyl-adenosine
  modified_base 29: mod_base = OTHER; note = 2'-O-Methyl-guanosine
  modified_base 30: mod_base = OTHER; note = 2'-O-Methyl-cytidine
  modified_base 31: mod_base = OTHER; note = 2'-O-Methyl-uridine
  modified_base 32: mod_base = OTHER; note = 2'-O-Methyl-adenosine
  modified_base 33: mod_base = OTHER; note = 2'-O-Methyl-guanosine
  modified_base 34: mod_base = OTHER; note = 2'-O-Methyl-adenosine
  modified_base 35: mod_base = OTHER; note = 2'-O-Methyl-adenosine
  modified_base 36: mod_base = OTHER; note = 2'-O-Methyl-adenosine
  modified_base 37: mod_base = OTHER; note = 2'-O-Methyl-uridine
  modified_base 38: mod_base = OTHER; note = 2'-O-Methyl-adenosine
  modified_base 39: mod_base = OTHER; note = 2'-O-Methyl-guanosine
  modified_base 40: mod_base = OTHER; note = 2'-O-Methyl-cytidine
  modified_base 41: mod_base = OTHER; note = 2'-O-Methyl-adenosine
  modified_base 42: mod_base = OTHER; note = 2'-O-Methyl-adenosine
  modified_base 45: mod_base = OTHER; note = uridine phosphorothioate
  modified_base 46: mod_base = OTHER; note = 2'-O-Methyl-adenosine
  modified_base 48: mod_base = OTHER; note = 2'-O-Methyl-adenosine
  modified_base 50: mod_base = OTHER; note = 2'-O-Methyl-uridine
  modified_base 52: mod_base = OTHER; note = 2'-O-Methyl-adenosine
  modified_base 53: mod_base = OTHER; note = 2'-O-Methyl-guanosine
  modified_base 54: mod_base = OTHER; note = 2'-O-Methyl-guanosine
  modified_base 55: mod_base = OTHER; note = 2'-O-Methyl-cytidine
  modified_base 56: mod_base = OTHER; note = 2'-O-Methyl-uridine
  modified_base 57: mod_base = OTHER; note = 2'-O-Methyl-adenosine
  modified_base 60: mod_base = OTHER; note = 2'-O-Methyl-cytidine
  modified_base 61: mod_base = OTHER; note = 2'-O-Methyl-cytidine
  modified_base 64: mod_base = OTHER; note = uridine phosphorothioate
  modified_base 66: mod_base = OTHER; note = 2'-O-Methyl-uridine
  modified_base 67: mod_base = OTHER; note = 2'-O-Methyl-cytidine
  modified_base 70: mod_base = OTHER; note = 2'-O-Methyl-cytidine
  modified_base 71: mod_base = OTHER; note = 2'-O-Methyl-uridine
  modified_base 72: mod_base = OTHER; note = 2'-O-Methyl-uridine
  modified_base 73: mod_base = OTHER; note = 2'-O-Methyl-guanosine
  modified_base 74: mod_base = OTHER; note = 2'-O-Methyl-adenosine
  modified_base 75: mod_base = OTHER; note = 2'-O-Methyl-adenosine
  modified_base 76: mod_base = OTHER; note = 2'-O-Methyl-adenosine
  modified_base 77: mod_base = OTHER; note = 2'-O-Methyl-adenosine
  modified_base 78: mod_base = OTHER; note = 2'-O-Methyl-adenosine
  modified_base 79: mod_base = OTHER; note = 2'-O-Methyl-guanosine
  modified_base 80: mod_base = OTHER; note = 2'-O-Methyl-uridine
  modified_base 81: mod_base = OTHER; note = 2'-O-Methyl-guanosine
  modified_base 83: mod_base = OTHER; note = 2'-O-Methyl-cytidine
  modified_base 84: mod_base = OTHER; note = 2'-O-Methyl-adenosine
  modified_base 85: mod_base = OTHER; note = 2'-O-Methyl-cytidine
  modified_base 86: mod_base = OTHER; note = 2'-O-Methyl-cytidine
  modified_base 87: mod_base = OTHER; note = 2'-O-Methyl-guanosine
  modified_base 88: mod_base = OTHER; note = 2'-O-Methyl-adenosine
  modified_base 89: mod_base = OTHER; note = 2'-O-Methyl-guanosine
  modified_base 90: mod_base = OTHER; note = 2'-O-Methyl-uridine
  modified_base 91: mod_base = OTHER; note = 2'-O-Methyl-cytidine
  modified_base 92: mod_base = OTHER; note = 2'-O-Methyl-guanosine
  modified_base 93: mod_base = OTHER; note = 2'-O-Methyl-guanosine
  modified_base 94: mod_base = OTHER; note = 2'-O-Methyl-uridine
  modified_base 95: mod_base = OTHER; note = 2'-O-Methyl-guanosine
  modified_base 96: mod_base = OTHER; note = 2'-O-Methyl-cytidine
  modified_base 97: mod_base = OTHER; note = 2'-O-Methyl-uridine
  modified_base 98: mod_base = OTHER; note = 2'-O-Methyl-uridine phosphorothioate
  modified_base 99: mod_base = OTHER; note = 2'-O-Methyl-uridine phosphorothioate
  modified_base 100: mod_base = OTHER; note = 2'-O-Methyl-uridine
  misc_difference 101: note = a, c, g, inosine, u, deoxyadenosine, deoxyguanosine, deoxycytidine, deoxyinosine, thymine, ribonebularine, 2'-O-methylnebularine, or 2'-deoxynebularine
  misc_difference 102: note = a, c, g, inosine, u, deoxyadenosine, deoxyguanosine, deoxycytidine, deoxyinosine, thymine, ribonebularine, 2'-O-methylnebularine, or 2'-deoxynebularine
  misc_difference 103: note = a, c, g, inosine, u, deoxyadenosine, deoxyguanosine, deoxycytidine, deoxyinosine, thymine, ribonebularine, 2'-O-methylnebularine, or 2'-deoxynebularine

SEQ ID NO: 3014 - RNA, 103 nt, synthetic construct; identical to SEQ ID NO: 1796
  source 1..103: mol_type = other RNA
  modified_base 1: mod_base = OTHER; note = 2'-O-Methyl-guanosine phosphorothioate
  modified_base 2: mod_base = OTHER; note = 2'-O-Methyl-adenosine phosphorothioate
  modified_base 3: mod_base = OTHER; note = 2'-O-Methyl-guanosine phosphorothioate
  modified_base 21: mod_base = OTHER; note = 2'-O-Methyl-guanosine
  modified_base 25: mod_base = OTHER; note = uridine phosphorothioate
  modified_base 28: mod_base = OTHER; note = 2'-O-Methyl-adenosine
  modified_base 29: mod_base = OTHER; note = 2'-O-Methyl-guanosine
  modified_base 30: mod_base = OTHER; note = 2'-O-Methyl-cytidine
  modified_base 31: mod_base = OTHER; note = 2'-O-Methyl-uridine
  modified_base 32: mod_base = OTHER; note = 2'-O-Methyl-adenosine
  modified_base 34: mod_base = OTHER; note = 2'-O-Methyl-adenosine
  modified_base 35: mod_base = OTHER; note = 2'-O-Methyl-adenosine
  modified_base 36: mod_base = OTHER; note = 2'-O-Methyl-adenosine
  modified_base 37: mod_base = OTHER; note = 2'-O-Methyl-uridine
  modified_base 38: mod_base = OTHER; note = 2'-O-Methyl-adenosine
  modified_base 39: mod_base = OTHER; note = 2'-O-Methyl-guanosine
  modified_base 40: mod_base = OTHER; note = 2'-O-Methyl-cytidine
  modified_base 41: mod_base = OTHER; note = 2'-O-Methyl-adenosine
  modified_base 42: mod_base = OTHER; note = 2'-O-Methyl-adenosine
  modified_base 45: mod_base = OTHER; note = uridine phosphorothioate
  modified_base 46: mod_base = OTHER; note = 2'-O-Methyl-adenosine
  modified_base 48: mod_base = OTHER; note = 2'-O-Methyl-adenosine
  modified_base 50: mod_base = OTHER; note = 2'-O-Methyl-uridine
  modified_base 52: mod_base = OTHER; note = 2'-O-Methyl-adenosine
  modified_base 53: mod_base = OTHER; note = 2'-O-Methyl-guanosine
  modified_base 54: mod_base = OTHER; note = 2'-O-Methyl-guanosine
  modified_base 55: mod_base = OTHER; note = 2'-O-Methyl-cytidine
  modified_base 56: mod_base = OTHER; note = 2'-O-Methyl-uridine
  modified_base 57: mod_base = OTHER; note = 2'-O-Methyl-adenosine
  modified_base 60: mod_base = OTHER; note = 2'-O-Methyl-cytidine
  modified_base 61: mod_base = OTHER; note = 2'-O-Methyl-cytidine
  modified_base 64: mod_base = OTHER; note = uridine phosphorothioate
  modified_base 66: mod_base = OTHER; note = 2'-O-Methyl-uridine
  modified_base 67: mod_base = OTHER; note = 2'-O-Methyl-cytidine
  modified_base 70: mod_base = OTHER; note = 2'-O-Methyl-cytidine
  modified_base 71: mod_base = OTHER; note = 2'-O-Methyl-uridine
  modified_base 72: mod_base = OTHER; note = 2'-O-Methyl-uridine
  modified_base 74: mod_base = OTHER; note = 2'-O-Methyl-adenosine
  modified_base 75: mod_base = OTHER; note = 2'-O-Methyl-adenosine
  modified_base 76: mod_base = OTHER; note = 2'-O-Methyl-adenosine
  modified_base 77: mod_base = OTHER; note = 2'-O-Methyl-adenosine
  modified_base 78: mod_base = OTHER; note = 2'-O-Methyl-adenosine
  modified_base 79: mod_base = OTHER; note = 2'-O-Methyl-guanosine
  modified_base 80: mod_base = OTHER; note = 2'-O-Methyl-uridine
  modified_base 81: mod_base = OTHER; note = 2'-O-Methyl-guanosine
  modified_base 83: mod_base = OTHER; note = 2'-O-Methyl-cytidine
  modified_base 84: mod_base = OTHER; note = 2'-O-Methyl-adenosine
  modified_base 85: mod_base = OTHER; note = 2'-O-Methyl-cytidine
  modified_base 86: mod_base = OTHER; note = 2'-O-Methyl-cytidine
  modified_base 87: mod_base = OTHER; note = 2'-O-Methyl-guanosine
  modified_base 88: mod_base = OTHER; note = 2'-O-Methyl-adenosine
  modified_base 89: mod_base = OTHER; note = 2'-O-Methyl-guanosine
  modified_base 90: mod_base = OTHER; note = 2'-O-Methyl-uridine
  modified_base 91: mod_base = OTHER; note = 2'-O-Methyl-cytidine
  modified_base 92: mod_base = OTHER; note = 2'-O-Methyl-guanosine
  modified_base 93: mod_base = OTHER; note = 2'-O-Methyl-guanosine
  modified_base 94: mod_base = OTHER; note = 2'-O-Methyl-uridine
  modified_base 95: mod_base = OTHER; note = 2'-O-Methyl-guanosine
  modified_base 96: mod_base = OTHER; note = 2'-O-Methyl-cytidine
  modified_base 97: mod_base = OTHER; note = 2'-O-Methyl-uridine
  modified_base 98: mod_base = OTHER; note = 2'-O-Methyl-uridine phosphorothioate
  modified_base 99: mod_base = OTHER; note = 2'-O-Methyl-uridine phosphorothioate
  modified_base 100: mod_base = OTHER; note = 2'-O-Methyl-uridine
  misc_difference 101: note = a, c, g, inosine, u, deoxyadenosine, deoxyguanosine, deoxycytidine, deoxyinosine, thymine, ribonebularine, 2'-O-methylnebularine, or 2'-deoxynebularine
  misc_difference 102: note = a, c, g, inosine, u, deoxyadenosine, deoxyguanosine, deoxycytidine, deoxyinosine, thymine, ribonebularine, 2'-O-methylnebularine, or 2'-deoxynebularine
  misc_difference 103: note = a, c, g, inosine, u, deoxyadenosine, deoxyguanosine, deoxycytidine, deoxyinosine, thymine, ribonebularine, 2'-O-methylnebularine, or 2'-deoxynebularine

SEQ ID NO: 3015 - RNA, 103 nt, synthetic construct; identical to SEQ ID NO: 1797
  source 1..103: mol_type = other RNA
  modified_base 1: mod_base = OTHER; note = 2'-O-Methyl-cytidine phosphorothioate
  modified_base 2: mod_base = OTHER; note = 2'-O-Methyl-adenosine phosphorothioate
  modified_base 3: mod_base = OTHER; note = 2'-O-Methyl-guanosine phosphorothioate
  modified_base 21: mod_base = OTHER; note = 2'-O-Methyl-guanosine
  modified_base 25: mod_base = OTHER; note = uridine phosphorothioate
  modified_base 28: mod_base = OTHER; note = 2'-O-Methyl-adenosine
  modified_base 29: mod_base = OTHER; note = 2'-O-Methyl-guanosine
  modified_base 30: mod_base = OTHER; note = 2'-O-Methyl-cytidine
  modified_base 31: mod_base = OTHER; note = 2'-O-Methyl-uridine
  modified_base 32: mod_base = OTHER; note = 2'-O-Methyl-adenosine
  modified_base 33: mod_base = OTHER; note = 2'-O-Methyl-guanosine
  modified_base 34: mod_base = OTHER; note = 2'-O-Methyl-adenosine
  modified_base 35: mod_base = OTHER; note = 2'-O-Methyl-adenosine
  modified_base 36: mod_base = OTHER; note = 2'-O-Methyl-adenosine
  modified_base 37: mod_base = OTHER; note = 2'-O-Methyl-uridine
  modified_base 38: mod_base = OTHER; note = 2'-O-Methyl-adenosine
  modified_base 39: mod_base = OTHER; note = 2'-O-Methyl-guanosine
  modified_base 40: mod_base = OTHER; note = 2'-O-Methyl-cytidine
  modified_base 41: mod_base = OTHER; note = 2'-O-Methyl-adenosine
  modified_base 42: mod_base = OTHER; note = 2'-O-Methyl-adenosine
  modified_base 45: mod_base = OTHER; note = uridine phosphorothioate
  modified_base 46: mod_base = OTHER; note = 2'-O-Methyl-adenosine
  modified_base 48: mod_base = OTHER; note = 2'-O-Methyl-adenosine
  modified_base 50: mod_base = OTHER; note = 2'-O-Methyl-uridine
  modified_base 52: mod_base = OTHER; note = 2'-O-Methyl-adenosine
  modified_base 53: mod_base = OTHER; note = 2'-O-Methyl-guanosine
  modified_base 54: mod_base = OTHER; note = 2'-O-Methyl-guanosine
  modified_base 57: mod_base = OTHER; note = 2'-O-Methyl-adenosine
  modified_base 61: mod_base = OTHER; note = 2'-O-Methyl-cytidine
  modified_base 64: mod_base = OTHER; note = uridine phosphorothioate
  modified_base 66: mod_base = OTHER; note = 2'-O-Methyl-uridine
  modified_base 67: mod_base = OTHER; note = 2'-O-Methyl-cytidine
  modified_base 70: mod_base = OTHER; note = 2'-O-Methyl-cytidine
  modified_base 71: mod_base = OTHER; note = 2'-O-Methyl-uridine
  modified_base 72: mod_base = OTHER; note = 2'-O-Methyl-uridine
  modified_base 74: mod_base = OTHER; note = 2'-O-Methyl-adenosine
  modified_base 75: mod_base = OTHER; note = 2'-O-Methyl-adenosine
  modified_base 76: mod_base = OTHER; note = 2'-O-Methyl-adenosine
  modified_base 77: mod_base = OTHER; note = 2'-O-Methyl-adenosine
  modified_base 78: mod_base = OTHER; note = 2'-O-Methyl-adenosine
  modified_base 79: mod_base = OTHER; note = 2'-O-Methyl-guanosine
  modified_base 80: mod_base = OTHER; note = 2'-O-Methyl-uridine
  modified_base 82: mod_base = OTHER; note = 2'-O-Methyl-guanosine
  modified_base 83: mod_base = OTHER; note = 2'-O-Methyl-cytidine
  modified_base 84: mod_base = OTHER; note = 2'-O-Methyl-adenosine
  modified_base 85: mod_base = OTHER; note = 2'-O-Methyl-cytidine
  modified_base 86: mod_base = OTHER; note = 2'-O-Methyl-cytidine
  modified_base 87: mod_base = OTHER; note = 2'-O-Methyl-guanosine
  modified_base 89: mod_base = OTHER; note = 2'-O-Methyl-guanosine
  modified_base 92: mod_base = OTHER; note = 2'-O-Methyl-guanosine
  modified_base 93: mod_base = OTHER; note = 2'-O-Methyl-guanosine
  modified_base 94: mod_base = OTHER; note = 2'-O-Methyl-uridine
  modified_base 95: mod_base = OTHER; note = 2'-O-Methyl-guanosine
  modified_base 96: mod_base = OTHER; note = 2'-O-Methyl-cytidine
  modified_base 97: mod_base = OTHER; note = 2'-O-Methyl-uridine
  modified_base 98: mod_base = OTHER; note = 2'-O-Methyl-uridine phosphorothioate
  modified_base 99: mod_base = OTHER; note = 2'-O-Methyl-uridine phosphorothioate
  modified_base 100: mod_base = OTHER; note = 2'-O-Methyl-uridine
  misc_difference 101: note = a, c, g, inosine, u, deoxyadenosine, deoxyguanosine, deoxycytidine, deoxyinosine, thymine, ribonebularine, 2'-O-methylnebularine, or 2'-deoxynebularine
  misc_difference 102: note = a, c, g, inosine, u, deoxyadenosine, deoxyguanosine, deoxycytidine, deoxyinosine, thymine, ribonebularine, 2'-O-methylnebularine, or 2'-deoxynebularine
  misc_difference 103: note = a, c, g, inosine, u, deoxyadenosine, deoxyguanosine, deoxycytidine, deoxyinosine, thymine, ribonebularine, 2'-O-methylnebularine, or 2'-deoxynebularine

SEQ ID NO: 3016 - RNA, 103 nt, synthetic construct; identical to SEQ ID NO: 1797
  source 1..103: mol_type = other RNA
  modified_base 1: mod_base = OTHER; note = 2'-O-Methyl-cytidine phosphorothioate
  modified_base 2: mod_base = OTHER; note = 2'-O-Methyl-adenosine phosphorothioate
  modified_base 3: mod_base = OTHER; note = 2'-O-Methyl-guanosine phosphorothioate
  modified_base 21: mod_base = OTHER; note = 2'-O-Methyl-guanosine
  modified_base 25: mod_base = OTHER; note = uridine phosphorothioate
  modified_base 28: mod_base = OTHER; note = 2'-O-Methyl-adenosine
  modified_base 29: mod_base = OTHER; note = 2'-O-Methyl-guanosine
  modified_base 30: mod_base = OTHER; note = 2'-O-Methyl-cytidine
  modified_base 31: mod_base = OTHER; note = 2'-O-Methyl-uridine
  modified_base 32: mod_base = OTHER; note = 2'-O-Methyl-adenosine
  modified_base 33: mod_base = OTHER; note = 2'-O-Methyl-guanosine
  modified_base 34: mod_base = OTHER; note = 2'-O-Methyl-adenosine
  modified_base 35: mod_base = OTHER; note = 2'-O-Methyl-adenosine
  modified_base 36: mod_base = OTHER; note = 2'-O-Methyl-adenosine
  modified_base 37: mod_base = OTHER; note = 2'-O-Methyl-uridine
  modified_base 38: mod_base = OTHER; note = 2'-O-Methyl-adenosine
  modified_base 39: mod_base = OTHER; note = 2'-O-Methyl-guanosine
  modified_base 40: mod_base = OTHER; note = 2'-O-Methyl-cytidine
  modified_base 41: mod_base = OTHER; note = 2'-O-Methyl-adenosine
  modified_base 42: mod_base = OTHER; note = 2'-O-Methyl-adenosine
  modified_base 45: mod_base = OTHER; note = uridine phosphorothioate
  modified_base 46: mod_base = OTHER; note = 2'-O-Methyl-adenosine
  modified_base 48: mod_base = OTHER; note = 2'-O-Methyl-adenosine
  modified_base 50: mod_base = OTHER; note = 2'-O-Methyl-uridine
  modified_base 52: mod_base = OTHER; note = 2'-O-Methyl-adenosine
  modified_base 53: mod_base = OTHER; note = 2'-O-Methyl-guanosine
  modified_base 54: mod_base = OTHER; note = 2'-O-Methyl-guanosine
  modified_base 55: mod_base = OTHER; note = 2'-O-Methyl-cytidine
  modified_base 56: mod_base = OTHER; note = 2'-O-Methyl-uridine
  modified_base 57: mod_base = OTHER; note = 2'-O-Methyl-adenosine
  modified_base 60: mod_base = OTHER; note = 2'-O-Methyl-cytidine
  modified_base 61: mod_base = OTHER; note = 2'-O-Methyl-cytidine
  modified_base 64: mod_base = OTHER; note = uridine phosphorothioate
  modified_base 66: mod_base = OTHER; note = 2'-O-Methyl-uridine
  modified_base 67: mod_base = OTHER; note = 2'-O-Methyl-cytidine
  modified_base 70: mod_base = OTHER; note = 2'-O-Methyl-cytidine
  modified_base 71: mod_base = OTHER; note = 2'-O-Methyl-uridine
  modified_base 72: mod_base = OTHER; note = 2'-O-Methyl-uridine
  modified_base 74: mod_base = OTHER; note = 2'-O-Methyl-adenosine
  modified_base 75: mod_base = OTHER; note = 2'-O-Methyl-adenosine
  modified_base 76: mod_base = OTHER; note = 2'-O-Methyl-adenosine
  modified_base 77: mod_base = OTHER; note = 2'-O-Methyl-adenosine
  modified_base 78: mod_base = OTHER; note = 2'-O-Methyl-adenosine
  modified_base 79: mod_base = OTHER; note = 2'-O-Methyl-guanosine
  modified_base 80: mod_base = OTHER; note = 2'-O-Methyl-uridine
  modified_base 82: mod_base = OTHER; note = 2'-O-Methyl-guanosine
  modified_base 83: mod_base = OTHER; note = 2'-O-Methyl-cytidine
  modified_base 84: mod_base = OTHER; note = 2'-O-Methyl-adenosine
  modified_base 85: mod_base = OTHER; note = 2'-O-Methyl-cytidine
  modified_base 86: mod_base = OTHER; note = 2'-O-Methyl-cytidine
  modified_base 87: mod_base = OTHER; note = 2'-O-Methyl-guanosine
  modified_base 89: mod_base = OTHER; note = 2'-O-Methyl-guanosine
  modified_base 92: mod_base = OTHER; note = 2'-O-Methyl-guanosine
  modified_base 93: mod_base = OTHER; note = 2'-O-Methyl-guanosine
  modified_base 94: mod_base = OTHER; note = 2'-O-Methyl-uridine
  modified_base 95: mod_base = OTHER; note = 2'-O-Methyl-guanosine
  modified_base 96: mod_base = OTHER; note = 2'-O-Methyl-cytidine
  modified_base 97: mod_base = OTHER; note = 2'-O-Methyl-uridine
  modified_base 98: mod_base = OTHER; note = 2'-O-Methyl-uridine phosphorothioate
  modified_base 99: mod_base = OTHER; note = 2'-O-Methyl-uridine phosphorothioate
  modified_base 100: mod_base = OTHER; note = 2'-O-Methyl-uridine
  misc_difference 101: note = a, c, g, inosine, u, deoxyadenosine, deoxyguanosine, deoxycytidine, deoxyinosine, thymine, ribonebularine, 2'-O-methylnebularine, or 2'-deoxynebularine
  misc_difference 102: note = a, c, g, inosine, u, deoxyadenosine, deoxyguanosine, deoxycytidine, deoxyinosine, thymine, ribonebularine, 2'-O-methylnebularine, or 2'-deoxynebularine
  misc_difference 103: note = a, c, g, inosine, u, deoxyadenosine, deoxyguanosine, deoxycytidine, deoxyinosine, thymine, ribonebularine, 2'-O-methylnebularine, or 2'-deoxynebularine

SEQ ID NO: 3017 - RNA, 103 nt, synthetic construct; identical to SEQ ID NO: 1797
  source 1..103: mol_type = other RNA
  modified_base 1: mod_base = OTHER; note = 2'-O-Methyl-cytidine phosphorothioate
  modified_base 2: mod_base = OTHER; note = 2'-O-Methyl-adenosine phosphorothioate
  modified_base 3: mod_base = OTHER; note = 2'-O-Methyl-guanosine phosphorothioate
  modified_base 21: mod_base = OTHER; note = 2'-O-Methyl-guanosine
  modified_base 25: mod_base = OTHER; note = uridine phosphorothioate
  modified_base 28: mod_base = OTHER; note = 2'-O-Methyl-adenosine
  modified_base 29: mod_base = OTHER; note = 2'-O-Methyl-guanosine
  modified_base 30: mod_base = OTHER; note = 2'-O-Methyl-cytidine
  modified_base 31: mod_base = OTHER; note = 2'-O-Methyl-uridine
  modified_base 32: mod_base = OTHER; note = 2'-O-Methyl-adenosine
  modified_base 33: mod_base = OTHER; note = 2'-O-Methyl-guanosine
  modified_base 34: mod_base = OTHER; note = 2'-O-Methyl-adenosine
  modified_base 35: mod_base = OTHER; note = 2'-O-Methyl-adenosine
  modified_base 36: mod_base = OTHER; note = 2'-O-Methyl-adenosine
  modified_base 37: mod_base = OTHER; note = 2'-O-Methyl-uridine
  modified_base 38: mod_base = OTHER; note = 2'-O-Methyl-adenosine
  modified_base 39: mod_base = OTHER; note = 2'-O-Methyl-guanosine
  modified_base 40: mod_base = OTHER; note = 2'-O-Methyl-cytidine
  modified_base 41: mod_base = OTHER; note = 2'-O-Methyl-adenosine
  modified_base 42: mod_base = OTHER; note = 2'-O-Methyl-adenosine
  modified_base 45: mod_base = OTHER; note = uridine phosphorothioate
  modified_base 46: mod_base = OTHER; note = 2'-O-Methyl-adenosine
  modified_base 48: mod_base = OTHER; note = 2'-O-Methyl-adenosine
  modified_base 50: mod_base = OTHER; note = 2'-O-Methyl-uridine
  modified_base 52: mod_base = OTHER; note = 2'-O-Methyl-adenosine
  modified_base 53: mod_base = OTHER; note = 2'-O-Methyl-guanosine
  modified_base 54: mod_base = OTHER; note = 2'-O-Methyl-guanosine
  modified_base 57: mod_base = OTHER; note = 2'-O-Methyl-adenosine
  modified_base 61: mod_base = OTHER; note = 2'-O-Methyl-cytidine
  modified_base 64: mod_base = OTHER; note = uridine phosphorothioate
  modified_base 66: mod_base = OTHER; note = 2'-O-Methyl-uridine
  modified_base 67: mod_base = OTHER; note = 2'-O-Methyl-cytidine
  modified_base 70: mod_base = OTHER; note = 2'-O-Methyl-cytidine
  modified_base 71: mod_base = OTHER; note = 2'-O-Methyl-uridine
  modified_base 72: mod_base = OTHER; note = 2'-O-Methyl-uridine
  modified_base 73: mod_base = OTHER; note = 2'-O-Methyl-guanosine
  modified_base 74: mod_base = OTHER; note = 2'-O-Methyl-adenosine
  modified_base 75: mod_base = OTHER; note = 2'-O-Methyl-adenosine
  modified_base 76: mod_base = OTHER; note = 2'-O-Methyl-adenosine
  modified_base 77: mod_base = OTHER; note = 2'-O-Methyl-adenosine
  modified_base 78: mod_base = OTHER; note = 2'-O-Methyl-adenosine
  modified_base 79: mod_base = OTHER; note = 2'-O-Methyl-guanosine
  modified_base 80: mod_base = OTHER; note = 2'-O-Methyl-uridine
  modified_base 82: mod_base = OTHER; note = 2'-O-Methyl-guanosine
  modified_base 83: mod_base = OTHER; note = 2'-O-Methyl-cytidine
  modified_base 84: mod_base = OTHER; note = 2'-O-Methyl-adenosine
  modified_base 85: mod_base = OTHER; note = 2'-O-Methyl-cytidine
  modified_base 86: mod_base = OTHER; note = 2'-O-Methyl-cytidine
  modified_base 87: mod_base = OTHER; note = 2'-O-Methyl-guanosine
  modified_base 89: mod_base = OTHER; note = 2'-O-Methyl-guanosine
  modified_base 92: mod_base = OTHER; note = 2'-O-Methyl-guanosine
  modified_base 93: mod_base = OTHER; note = 2'-O-Methyl-guanosine
  modified_base 94: mod_base = OTHER; note = 2'-O-Methyl-uridine
  modified_base 95: mod_base = OTHER; note = 2'-O-Methyl-guanosine
  modified_base 96: mod_base = OTHER; note = 2'-O-Methyl-cytidine
  modified_base 97: mod_base = OTHER; note = 2'-O-Methyl-uridine
  modified_base 98: mod_base = OTHER; note = 2'-O-Methyl-uridine phosphorothioate
  modified_base 99: mod_base = OTHER; note = 2'-O-Methyl-uridine phosphorothioate
  modified_base 100: mod_base = OTHER; note = 2'-O-Methyl-uridine
  misc_difference 101: note = a, c, g, inosine, u, deoxyadenosine, deoxyguanosine, deoxycytidine, deoxyinosine, thymine, ribonebularine, 2'-O-methylnebularine, or 2'-deoxynebularine
  misc_difference 102: note = a, c, g, inosine, u, deoxyadenosine, deoxyguanosine, deoxycytidine, deoxyinosine, thymine, ribonebularine, 2'-O-methylnebularine, or 2'-deoxynebularine
  misc_difference 103: note = a, c, g, inosine, u, deoxyadenosine, deoxyguanosine, deoxycytidine, deoxyinosine, thymine, ribonebularine, 2'-O-methylnebularine, or 2'-deoxynebularine

SEQ ID NO: 3018 - RNA, 103 nt, synthetic construct; identical to SEQ ID NO: 1797
  source 1..103: mol_type = other RNA
  modified_base 1: mod_base = OTHER; note = 2'-O-Methyl-cytidine phosphorothioate
  modified_base 2: mod_base = OTHER; note = 2'-O-Methyl-adenosine phosphorothioate
  modified_base 3: mod_base = OTHER; note = 2'-O-Methyl-guanosine phosphorothioate
  modified_base 21: mod_base = OTHER; note = 2'-O-Methyl-guanosine
  modified_base 25: mod_base = OTHER; note = uridine phosphorothioate
  modified_base 28: mod_base = OTHER; note = 2'-O-Methyl-adenosine
  modified_base 29: mod_base = OTHER; note = 2'-O-Methyl-guanosine
  modified_base 30: mod_base = OTHER; note = 2'-O-Methyl-cytidine
  modified_base 31: mod_base = OTHER; note = 2'-O-Methyl-uridine
  modified_base 32: mod_base = OTHER; note = 2'-O-Methyl-adenosine
  modified_base 33: mod_base = OTHER; note = 2'-O-Methyl-guanosine
  modified_base 34: mod_base = OTHER; note = 2'-O-Methyl-adenosine
  modified_base 35: mod_base = OTHER; note = 2'-O-Methyl-adenosine
  modified_base 36: mod_base = OTHER; note = 2'-O-Methyl-adenosine
  modified_base 37: mod_base = OTHER; note = 2'-O-Methyl-uridine
  modified_base 38: mod_base = OTHER; note = 2'-O-Methyl-adenosine
  modified_base 39: mod_base = OTHER; note = 2'-O-Methyl-guanosine
  modified_base 40: mod_base = OTHER; note = 2'-O-Methyl-cytidine
  modified_base 41: mod_base = OTHER; note = 2'-O-Methyl-adenosine
  modified_base 42: mod_base = OTHER; note = 2'-O-Methyl-adenosine
  modified_base 45: mod_base = OTHER; note = uridine phosphorothioate
  modified_base 46: mod_base = OTHER; note = 2'-O-Methyl-adenosine
  modified_base 48: mod_base = OTHER; note = 2'-O-Methyl-adenosine
  modified_base 50: mod_base = OTHER; note = 2'-O-Methyl-uridine
  modified_base 52: mod_base = OTHER; note = 2'-O-Methyl-adenosine
  modified_base 53: mod_base = OTHER; note = 2'-O-Methyl-guanosine
  modified_base 54: mod_base = OTHER; note = 2'-O-Methyl-guanosine
  modified_base 57: mod_base = OTHER; note = 2'-O-Methyl-adenosine
  modified_base 61: mod_base = OTHER; note = 2'-O-Methyl-cytidine
  modified_base 64: mod_base = OTHER; note = uridine phosphorothioate
  modified_base 66: mod_base = OTHER; note = 2'-O-Methyl-uridine
  modified_base 67: mod_base = OTHER; note = 2'-O-Methyl-cytidine
  modified_base 70: mod_base = OTHER; note = 2'-O-Methyl-cytidine
  modified_base 71: mod_base = OTHER; note = 2'-O-Methyl-uridine
  modified_base 72: mod_base = OTHER; note = 2'-O-Methyl-uridine
  modified_base 73: mod_base = OTHER; note = 2'-O-Methyl-guanosine
  modified_base 74: mod_base = OTHER; note = 2'-O-Methyl-adenosine
  modified_base 75: mod_base = OTHER; note = 2'-O-Methyl-adenosine
  modified_base 76: mod_base = OTHER; note = 2'-O-Methyl-adenosine
  modified_base 77: mod_base = OTHER; note = 2'-O-Methyl-adenosine
  modified_base 78: mod_base = OTHER; note = 2'-O-Methyl-adenosine
  modified_base 79: mod_base = OTHER; note = 2'-O-Methyl-guanosine
  modified_base 80: mod_base = OTHER; note = 2'-O-Methyl-uridine
  modified_base 82: mod_base = OTHER; note = 2'-O-Methyl-guanosine
  modified_base 83: mod_base = OTHER; note = 2'-O-Methyl-cytidine
  modified_base 84: mod_base = OTHER; note = 2'-O-Methyl-adenosine
  modified_base 85: mod_base = OTHER; note = 2'-O-Methyl-cytidine
  modified_base 86: mod_base = OTHER; note = 2'-O-Methyl-cytidine
  modified_base 87: mod_base = OTHER; note = 2'-O-Methyl-guanosine
  modified_base 89: mod_base = OTHER; note = 2'-O-Methyl-guanosine
  modified_base 91: mod_base = OTHER; note = 2'-O-Methyl-cytidine
  modified_base 92: mod_base = OTHER; note = 2'-O-Methyl-guanosine
  modified_base 93: mod_base = OTHER; note = 2'-O-Methyl-guanosine
  modified_base 94: mod_base = OTHER; note = 2'-O-Methyl-uridine
  modified_base 95: mod_base = OTHER; note = 2'-O-Methyl-guanosine
  modified_base 96: mod_base = OTHER; note = 2'-O-Methyl-cytidine
  modified_base 97: mod_base = OTHER; note = 2'-O-Methyl-uridine
  modified_base 98: mod_base = OTHER; note = 2'-O-Methyl-uridine phosphorothioate
  modified_base 99: mod_base = OTHER; note = 2'-O-Methyl-uridine phosphorothioate
  modified_base 100: mod_base = OTHER; note = 2'-O-Methyl-uridine
  misc_difference 101: note = a, c, g, inosine, u, deoxyadenosine, deoxyguanosine, deoxycytidine, deoxyinosine, thymine, ribonebularine, 2'-O-methylnebularine, or 2'-deoxynebularine
  misc_difference 102: note = a, c, g, inosine, u, deoxyadenosine, deoxyguanosine, deoxycytidine, deoxyinosine, thymine, ribonebularine, 2'-O-methylnebularine, or 2'-deoxynebularine
  misc_difference 103: note = a, c, g, inosine, u, deoxyadenosine, deoxyguanosine, deoxycytidine, deoxyinosine, thymine, ribonebularine, 2'-O-methylnebularine, or 2'-deoxynebularine

SEQ ID NO: 3019 - RNA, 103 nt, synthetic construct; identical to SEQ ID NO: 1797
  source 1..103: mol_type = other RNA
  modified_base 1: mod_base = OTHER; note = 2'-O-Methyl-cytidine phosphorothioate
  modified_base 2: mod_base = OTHER; note = 2'-O-Methyl-adenosine phosphorothioate
  modified_base 3: mod_base = OTHER; note = 2'-O-Methyl-guanosine phosphorothioate
  modified_base 21: mod_base = OTHER; note = 2'-O-Methyl-guanosine
  modified_base 25: mod_base = OTHER; note = uridine phosphorothioate
  modified_base 28: mod_base = OTHER; note = 2'-O-Methyl-adenosine
  modified_base 29: mod_base = OTHER; note = 2'-O-Methyl-guanosine
  modified_base 30: mod_base = OTHER; note = 2'-O-Methyl-cytidine
  modified_base 31: mod_base = OTHER; note = 2'-O-Methyl-uridine
  modified_base 32: mod_base = OTHER; note = 2'-O-Methyl-adenosine
  modified_base 34: mod_base = OTHER; note = 2'-O-Methyl-adenosine
  modified_base 35: mod_base = OTHER; note = 2'-O-Methyl-adenosine
  modified_base 36: mod_base = OTHER; note = 2'-O-Methyl-adenosine
  modified_base 37: mod_base = OTHER; note = 2'-O-Methyl-uridine
  modified_base 38: mod_base = OTHER; note = 2'-O-Methyl-adenosine
  modified_base 39: mod_base = OTHER; note = 2'-O-Methyl-guanosine
  modified_base 40: mod_base = OTHER; note = 2'-O-Methyl-cytidine
  modified_base 41: mod_base = OTHER; note = 2'-O-Methyl-adenosine
  modified_base 42: mod_base = OTHER; note = 2'-O-Methyl-adenosine
  modified_base 45: mod_base = OTHER; note = uridine phosphorothioate
  modified_base 46: mod_base = OTHER; note = 2'-O-Methyl-adenosine
  modified_base 48: mod_base = OTHER; note = 2'-O-Methyl-adenosine
  modified_base 50: mod_base = OTHER; note = 2'-O-Methyl-uridine
  modified_base 52: mod_base = OTHER; note = 2'-O-Methyl-adenosine
  modified_base 53: mod_base = OTHER; note = 2'-O-Methyl-guanosine
  modified_base 54: mod_base = OTHER; note = 2'-O-Methyl-guanosine
  modified_base 57: mod_base = OTHER; note = 2'-O-Methyl-adenosine
  modified_base 61: mod_base = OTHER; note = 2'-O-Methyl-cytidine
  modified_base 64: mod_base = OTHER; note = uridine phosphorothioate
  modified_base 66: mod_base = OTHER; note = 2'-O-Methyl-uridine
  modified_base 67: mod_base = OTHER; note = 2'-O-Methyl-cytidine
  modified_base 70: mod_base = OTHER; note = 2'-O-Methyl-cytidine
  modified_base 71: mod_base = OTHER; note = 2'-O-Methyl-uridine
  modified_base 72: mod_base = OTHER; note = 2'-O-Methyl-uridine
  modified_base 73: mod_base = OTHER; note = 2'-O-Methyl-guanosine
  modified_base 74: mod_base = OTHER; note = 2'-O-Methyl-adenosine
  modified_base 75: mod_base = OTHER; note = 2'-O-Methyl-adenosine
  modified_base 76: mod_base = OTHER; note = 2'-O-Methyl-adenosine
  modified_base 77: mod_base = OTHER; note = 2'-O-Methyl-adenosine
  modified_base 78: mod_base = OTHER; note = 2'-O-Methyl-adenosine
  modified_base 79: mod_base = OTHER; note = 2'-O-Methyl-guanosine
  modified_base 80: mod_base = OTHER; note = 2'-O-Methyl-uridine
  modified_base 82: mod_base = OTHER; note = 2'-O-Methyl-guanosine
  modified_base 83: mod_base = OTHER; note = 2'-O-Methyl-cytidine
  modified_base 84: mod_base = OTHER; note = 2'-O-Methyl-adenosine
  modified_base 85: mod_base = OTHER; note = 2'-O-Methyl-cytidine
  modified_base 86: mod_base = OTHER; note = 2'-O-Methyl-cytidine
  modified_base 87: mod_base = OTHER; note = 2'-O-Methyl-guanosine
  modified_base 89: mod_base = OTHER; note = 2'-O-Methyl-guanosine
  modified_base 92: mod_base = OTHER; note = 2'-O-Methyl-guanosine
  modified_base 93: mod_base = OTHER; note = 2'-O-Methyl-guanosine
  modified_base 94: mod_base = OTHER; note = 2'-O-Methyl-uridine
  modified_base 95: mod_base = OTHER; note = 2'-O-Methyl-guanosine
  modified_base 96: mod_base = OTHER; note = 2'-O-Methyl-cytidine
  modified_base 97: mod_base = OTHER; note = 2'-O-Methyl-uridine
  modified_base 98: mod_base = OTHER; note = 2'-O-Methyl-uridine phosphorothioate
  modified_base 99: mod_base = OTHER; note = 2'-O-Methyl-uridine phosphorothioate
  modified_base 100: mod_base = OTHER; note = 2'-O-Methyl-uridine
  misc_difference 101: note = a, c, g, inosine, u, deoxyadenosine, deoxyguanosine, deoxycytidine, deoxyinosine, thymine, ribonebularine, 2'-O-methylnebularine, or 2'-deoxynebularine
  misc_difference 102: note = a, c, g, inosine, u, deoxyadenosine, deoxyguanosine, deoxycytidine, deoxyinosine, thymine, ribonebularine, 2'-O-methylnebularine, or 2'-deoxynebularine
  misc_difference 103: note = a, c, g, inosine, u, deoxyadenosine, deoxyguanosine, deoxycytidine, deoxyinosine, thymine, ribonebularine, 2'-O-methylnebularine, or 2'-deoxynebularine

SEQ ID NO: 3020 - RNA, 103 nt, synthetic construct; identical to SEQ ID NO: 1797
  source 1..103: mol_type = other RNA
  modified_base 1: mod_base = OTHER; note = 2'-O-Methyl-cytidine phosphorothioate
  modified_base 2: mod_base = OTHER; note = 2'-O-Methyl-adenosine phosphorothioate
  modified_base 3: mod_base = OTHER; note = 2'-O-Methyl-guanosine phosphorothioate
  modified_base 21: mod_base = OTHER; note = 2'-O-Methyl-guanosine
  modified_base 25: mod_base = OTHER; note = uridine phosphorothioate
  modified_base 28: mod_base = OTHER; note = 2'-O-Methyl-adenosine
  modified_base 29: mod_base = OTHER; note = 2'-O-Methyl-guanosine
  modified_base 30: mod_base = OTHER; note = 2'-O-Methyl-cytidine
  modified_base 31: mod_base = OTHER; note = 2'-O-Methyl-uridine
  modified_base 32: mod_base = OTHER; note = 2'-O-Methyl-adenosine
  modified_base 34: mod_base = OTHER; note = 2'-O-Methyl-adenosine
  modified_base 35: mod_base = OTHER; note = 2'-O-Methyl-adenosine
  modified_base 36: mod_base = OTHER; note = 2'-O-Methyl-adenosine
  modified_base 37: mod_base = OTHER; note = 2'-O-Methyl-uridine
  modified_base 38: mod_base = OTHER; note = 2'-O-Methyl-adenosine
  modified_base 39: mod_base = OTHER; note = 2'-O-Methyl-guanosine
  modified_base 40: mod_base = OTHER; note = 2'-O-Methyl-cytidine
  modified_base 41: mod_base = OTHER; note = 2'-O-Methyl-adenosine
  modified_base 42: mod_base = OTHER; note = 2'-O-Methyl-adenosine
  modified_base 45: mod_base = OTHER; note = uridine phosphorothioate
  modified_base 46: mod_base = OTHER; note = 2'-O-Methyl-adenosine
  modified_base 48: mod_base = OTHER; note = 2'-O-Methyl-adenosine
  modified_base 50: mod_base = OTHER; note = 2'-O-Methyl-uridine
  modified_base 52: mod_base = OTHER; note = 2'-O-Methyl-adenosine
  modified_base 53: mod_base = OTHER; note = 2'-O-Methyl-guanosine
  modified_base 54: mod_base = OTHER; note = 2'-O-Methyl-guanosine
  modified_base 57: mod_base = OTHER; note = 2'-O-Methyl-adenosine
  modified_base 61: mod_base = OTHER; note = 2'-O-Methyl-cytidine
  modified_base 64: mod_base = OTHER; note = uridine phosphorothioate
  modified_base 66: mod_base = OTHER; note = 2'-O-Methyl-uridine
  modified_base 67: mod_base = OTHER; note = 2'-O-Methyl-cytidine
  modified_base 70: mod_base = OTHER; note = 2'-O-Methyl-cytidine
  modified_base 71: mod_base = OTHER; note = 2'-O-Methyl-uridine
  modified_base 72: mod_base = OTHER; note = 2'-O-Methyl-uridine
  modified_base 73: mod_base = OTHER; note = 2'-O-Methyl-guanosine
  modified_base 74: mod_base = OTHER; note = 2'-O-Methyl-adenosine
  modified_base 75: mod_base = OTHER; note = 2'-O-Methyl-adenosine
  modified_base 76: mod_base = OTHER; note = 2'-O-Methyl-adenosine
  modified_base 77: mod_base = OTHER; note = 2'-O-Methyl-adenosine
  modified_base 78: mod_base = OTHER; note = 2'-O-Methyl-adenosine
  modified_base 79: mod_base = OTHER; note = 2'-O-Methyl-guanosine
  modified_base 80: mod_base = OTHER; note = 2'-O-Methyl-uridine
  modified_base 82: mod_base = OTHER; note = 2'-O-Methyl-guanosine
  modified_base 83: mod_base = OTHER; note = 2'-O-Methyl-cytidine
  modified_base 84: mod_base = OTHER; note = 2'-O-Methyl-adenosine
  modified_base 85: mod_base = OTHER; note = 2'-O-Methyl-cytidine
  modified_base 86: mod_base = OTHER; note = 2'-O-Methyl-cytidine
  modified_base 87: mod_base = OTHER; note = 2'-O-Methyl-guanosine
  modified_base 89: mod_base = OTHER; note = 2'-O-Methyl-guanosine
  modified_base 91: mod_base = OTHER; note = 2'-O-Methyl-cytidine
  modified_base 92: mod_base = OTHER; note = 2'-O-Methyl-guanosine
  modified_base 93: mod_base = OTHER; note = 2'-O-Methyl-guanosine
  modified_base 94: mod_base = OTHER; note = 2'-O-Methyl-uridine
  modified_base 95: mod_base = OTHER; note = 2'-O-Methyl-guanosine
  modified_base 96: mod_base = OTHER; note = 2'-O-Methyl-cytidine
  modified_base 97: mod_base = OTHER; note = 2'-O-Methyl-uridine
  modified_base 98: mod_base = OTHER; note = 2'-O-Methyl-uridine phosphorothioate
  modified_base 99: mod_base = OTHER; note = 2'-O-Methyl-uridine phosphorothioate
  modified_base 100: mod_base = OTHER; note = 2'-O-Methyl-uridine
  misc_difference 101: note = a, c, g, inosine, u, deoxyadenosine, deoxyguanosine, deoxycytidine, deoxyinosine, thymine, ribonebularine, 2'-O-methylnebularine, or 2'-deoxynebularine
  misc_difference 102: note = a, c, g, inosine, u, deoxyadenosine, deoxyguanosine, deoxycytidine, deoxyinosine, thymine, ribonebularine, 2'-O-methylnebularine, or 2'-deoxynebularine
  misc_difference 103: note = a, c, g, inosine, u, deoxyadenosine, deoxyguanosine, deoxycytidine, deoxyinosine, thymine, ribonebularine, 2'-O-methylnebularine, or 2'-deoxynebularine

SEQ ID NO: 3021 - RNA, 103 nt, synthetic construct; identical to SEQ ID NO: 1797
  source 1..103: mol_type = other RNA
  modified_base 1: mod_base = OTHER; note = 2'-O-Methyl-cytidine phosphorothioate
  modified_base 2: mod_base = OTHER; note = 2'-O-Methyl-adenosine phosphorothioate
  modified_base 3: mod_base = OTHER; note = 2'-O-Methyl-guanosine phosphorothioate
  modified_base 21: mod_base = OTHER; note = 2'-O-Methyl-guanosine
  modified_base 25: mod_base = OTHER; note = uridine phosphorothioate
  modified_base 28: mod_base = OTHER; note = 2'-O-Methyl-adenosine
  modified_base 29: mod_base = OTHER; note = 2'-O-Methyl-guanosine
  modified_base 30: mod_base = OTHER; note = 2'-O-Methyl-cytidine
  modified_base 31: mod_base = OTHER; note = 2'-O-Methyl-uridine
  modified_base 32: mod_base = OTHER; note = 2'-O-Methyl-adenosine
  modified_base 34: mod_base = OTHER; note = 2'-O-Methyl-adenosine
  modified_base 35: mod_base = OTHER; note = 2'-O-Methyl-adenosine
  modified_base 36: mod_base = OTHER; note = 2'-O-Methyl-adenosine
  modified_base 37: mod_base = OTHER; note = 2'-O-Methyl-uridine
  modified_base 38: mod_base = OTHER; note = 2'-O-Methyl-adenosine
  modified_base 39: mod_base = OTHER; note = 2'-O-Methyl-guanosine
  modified_base 40: mod_base = OTHER; note = 2'-O-Methyl-cytidine
  modified_base 41: mod_base = OTHER; note = 2'-O-Methyl-adenosine
  modified_base 42: mod_base = OTHER; note = 2'-O-Methyl-adenosine
  modified_base 45: mod_base = OTHER; note = uridine phosphorothioate
  modified_base 46: mod_base = OTHER; note = 2'-O-Methyl-adenosine
  modified_base 48: mod_base = OTHER; note = 2'-O-Methyl-adenosine
  modified_base 50: mod_base = OTHER; note = 2'-O-Methyl-uridine
  modified_base 52: mod_base = OTHER; note = 2'-O-Methyl-adenosine
  modified_base 53: mod_base = OTHER; note = 2'-O-Methyl-guanosine
  modified_base 54: mod_base = OTHER; note = 2'-O-Methyl-guanosine
  modified_base 55: mod_base = OTHER; note = 2'-O-Methyl-cytidine
  modified_base 56: mod_base = OTHER; note = 2'-O-Methyl-uridine
  modified_base 57: mod_base = OTHER; note = 2'-O-Methyl-adenosine
  modified_base 60: mod_base = OTHER; note = 2'-O-Methyl-cytidine
  modified_base 61: mod_base = OTHER; note = 2'-O-Methyl-cytidine
  modified_base 64: mod_base = OTHER; note = uridine phosphorothioate
  modified_base 66: mod_base = OTHER; note = 2'-O-Methyl-uridine
  modified_base 67: mod_base = OTHER; note = 2'-O-Methyl-cytidine
  modified_base 70: mod_base = OTHER; note = 2'-O-Methyl-cytidine
  modified_base 71: mod_base = OTHER; note = 2'-O-Methyl-uridine
  modified_base 72: mod_base = OTHER; note = 2'-O-Methyl-uridine
  modified_base 74: mod_base = OTHER; note = 2'-O-Methyl-adenosine
  modified_base 75: mod_base = OTHER; note = 2'-O-Methyl-adenosine
  modified_base 76: mod_base = OTHER; note = 2'-O-Methyl-adenosine
  modified_base 77: mod_base = OTHER; note = 2'-O-Methyl-adenosine
  modified_base 78: mod_base = OTHER; note = 2'-O-Methyl-adenosine
  modified_base 79: mod_base = OTHER; note = 2'-O-Methyl-guanosine
  modified_base 80: mod_base = OTHER; note = 2'-O-Methyl-uridine
  modified_base 82: mod_base = OTHER; note = 2'-O-Methyl-guanosine
  modified_base 83: mod_base = OTHER; note = 2'-O-Methyl-cytidine
  modified_base 84: mod_base = OTHER; note = 2'-O-Methyl-adenosine
  modified_base 85: mod_base = OTHER; note = 2'-O-Methyl-cytidine
  modified_base 86: mod_base = OTHER; note = 2'-O-Methyl-cytidine
  modified_base 87: mod_base = OTHER; note = 2'-O-Methyl-guanosine
  modified_base 89: mod_base = OTHER; note = 2'-O-Methyl-guanosine
  modified_base 92: mod_base = OTHER; note = 2'-O-Methyl-guanosine
  modified_base 93: mod_base = OTHER; note = 2'-O-Methyl-guanosine
  modified_base 94: mod_base = OTHER; note = 2'-O-Methyl-uridine
  modified_base 95: mod_base = OTHER; note = 2'-O-Methyl-guanosine
  modified_base 96: mod_base = OTHER; note = 2'-O-Methyl-cytidine
  modified_base 97: mod_base = OTHER; note = 2'-O-Methyl-uridine
  modified_base 98: mod_base = OTHER; note = 2'-O-Methyl-uridine phosphorothioate
  modified_base 99: mod_base = OTHER; note = 2'-O-Methyl-uridine phosphorothioate
  modified_base 100: mod_base = OTHER; note = 2'-O-Methyl-uridine
  misc_difference 101: note = a, c, g, inosine, u, deoxyadenosine, deoxyguanosine, deoxycytidine, deoxyinosine, thymine, ribonebularine, 2'-O-methylnebularine, or 2'-deoxynebularine
  misc_difference 102: note = a, c, g, inosine, u, deoxyadenosine, deoxyguanosine, deoxycytidine, deoxyinosine, thymine, ribonebularine, 2'-O-methylnebularine, or 2'-deoxynebularine
  misc_difference 103: note = a, c, g, inosine, u, deoxyadenosine, deoxyguanosine, deoxycytidine, deoxyinosine, thymine, ribonebularine, 2'-O-methylnebularine, or 2'-deoxynebularine

SEQ ID NO: 3022 - RNA, 103 nt, synthetic construct; identical to SEQ ID NO: 1795
  source 1..103: mol_type = other RNA
  modified_base 1: mod_base = OTHER; note = 2'-O-Methyl-cytidine phosphorothioate
  modified_base 2: mod_base = OTHER; note = 2'-O-Methyl-cytidine phosphorothioate
  modified_base 3: mod_base = OTHER; note = 2'-O-Methyl-cytidine
  modified_base 21: mod_base = OTHER; note = 2'-O-Methyl-guanosine
  modified_base 28: mod_base = OTHER; note = 2'-O-Methyl-adenosine
  modified_base 29: mod_base = OTHER; note = 2'-O-Methyl-guanosine
  modified_base 30: mod_base = OTHER; note = 2'-O-Methyl-cytidine
  modified_base 31: mod_base = OTHER; note = 2'-O-Methyl-uridine
  modified_base 32: mod_base = OTHER; note = 2'-O-Methyl-adenosine
  modified_base 33: mod_base = OTHER; note = 2'-O-Methyl-guanosine
  modified_base 34: mod_base = OTHER; note = 2'-O-Methyl-adenosine
  modified_base 35: mod_base = OTHER; note = 2'-O-Methyl-adenosine
  modified_base 36: mod_base = OTHER; note = 2'-O-Methyl-adenosine
  modified_base 37: mod_base = OTHER; note = 2'-O-Methyl-uridine
  modified_base 38: mod_base = OTHER; note = 2'-O-Methyl-adenosine
  modified_base 39: mod_base = OTHER; note = 2'-O-Methyl-guanosine
  modified_base 40: mod_base = OTHER; note = 2'-O-Methyl-cytidine
  modified_base 41: mod_base = OTHER; note = 2'-O-Methyl-adenosine
  modified_base 42: mod_base = OTHER; note = 2'-O-Methyl-adenosine
  modified_base 46: mod_base = OTHER; note = 2'-O-Methyl-adenosine
  modified_base 48: mod_base = OTHER; note = 2'-O-Methyl-adenosine
  modified_base 50: mod_base = OTHER; note = 2'-O-Methyl-uridine
  modified_base 52: mod_base = OTHER; note = 2'-O-Methyl-adenosine
  modified_base 53: mod_base = OTHER; note = 2'-O-Methyl-guanosine
  modified_base 54: mod_base = OTHER; note = 2'-O-Methyl-guanosine
  modified_base 55: mod_base = OTHER; note = 2'-O-Methyl-cytidine
  modified_base 56: mod_base = OTHER; note = 2'-O-Methyl-uridine
  modified_base 57: mod_base = OTHER; note = 2'-O-Methyl-adenosine
  modified_base 60: mod_base = OTHER; note = 2'-O-Methyl-cytidine
  modified_base 61: mod_base = OTHER; note = 2'-O-Methyl-cytidine
  modified_base 66: mod_base = OTHER; note = 2'-O-Methyl-uridine
  modified_base 67: mod_base = OTHER; note = 2'-O-Methyl-cytidine
  modified_base 70: mod_base = OTHER; note = 2'-O-Methyl-cytidine
  modified_base 71: mod_base = OTHER; note = 2'-O-Methyl-uridine
  modified_base 72: mod_base = OTHER; note = 2'-O-Methyl-uridine
  modified_base 73: mod_base = OTHER; note = 2'-O-Methyl-guanosine
  modified_base 74: mod_base = OTHER; note = 2'-O-Methyl-adenosine
  modified_base 75: mod_base = OTHER; note = 2'-O-Methyl-adenosine
  modified_base 76: mod_base = OTHER; note = 2'-O-Methyl-adenosine
  modified_base 77: mod_base = OTHER; note = 2'-O-Methyl-adenosine
  modified_base 78: mod_base = OTHER; note = 2'-O-Methyl-adenosine
  modified_base 79: mod_base = OTHER; note = 2'-O-Methyl-guanosine
  modified_base 80: mod_base = OTHER; note = 2'-O-Methyl-uridine
  modified_base 81: mod_base = OTHER; note = 2'-O-Methyl-guanosine
  modified_base 83: mod_base = OTHER; note = 2'-O-Methyl-cytidine
  modified_base 84: mod_base = OTHER; note = 2'-O-Methyl-adenosine
  modified_base 85: mod_base = OTHER; note = 2'-O-Methyl-cytidine
  modified_base 86: mod_base = OTHER; note = 2'-O-Methyl-cytidine
  modified_base 87: mod_base = OTHER; note = 2'-O-Methyl-guanosine
  modified_base 88: mod_base = OTHER; note = 2'-O-Methyl-adenosine
  modified_base 89: mod_base = OTHER; note = 2'-O-Methyl-guanosine
  modified_base 90: mod_base = OTHER; note = 2'-O-Methyl-uridine
  modified_base 91: mod_base = OTHER; note = 2'-O-Methyl-cytidine
  modified_base 92: mod_base = OTHER; note = 2'-O-Methyl-guanosine
  modified_base 93: mod_base = OTHER; note = 2'-O-Methyl-guanosine
  modified_base 94: mod_base = OTHER; note = 2'-O-Methyl-uridine
  modified_base 95: mod_base = OTHER; note = 2'-O-Methyl-guanosine
  modified_base 96: mod_base = OTHER; note = 2'-O-Methyl-cytidine
  modified_base 97: mod_base = OTHER; note = 2'-O-Methyl-uridine
  modified_base 98: mod_base = OTHER; note = 2'-O-Methyl-uridine phosphorothioate
  modified_base 99: mod_base = OTHER; note = 2'-O-Methyl-uridine phosphorothioate
  modified_base 100: mod_base = OTHER; note = 2'-O-Methyl-uridine
  misc_difference 101: note = a, c, g, inosine, u, deoxyadenosine, deoxyguanosine, deoxycytidine, deoxyinosine, thymine, ribonebularine, 2'-O-methylnebularine, or 2'-deoxynebularine
  misc_difference 102: note = a, c, g, inosine, u, deoxyadenosine, deoxyguanosine, deoxycytidine, deoxyinosine, thymine, ribonebularine, 2'-O-methylnebularine, or 2'-deoxynebularine
  misc_difference 103: note = a, c, g, inosine, u, deoxyadenosine, deoxyguanosine, deoxycytidine, deoxyinosine, thymine, ribonebularine, 2'-O-methylnebularine, or 2'-deoxynebularine

SEQ ID NO: 3023 - RNA, 103 nt, synthetic construct; identical to SEQ ID NO: 1795
  source 1..103: mol_type = other RNA
  modified_base 1: mod_base = OTHER; note = 2'-O-Methyl-cytidine phosphorothioate
  modified_base 2: mod_base = OTHER; note = 2'-O-Methyl-cytidine phosphorothioate
  modified_base 3: mod_base = OTHER; note = 2'-O-Methyl-cytidine
  modified_base 21: mod_base = OTHER; note = 2'-O-Methyl-guanosine
  modified_base 28: mod_base = OTHER; note = 2'-O-Methyl-adenosine
  modified_base 29: mod_base = OTHER; note = 2'-O-Methyl-guanosine
  modified_base 30: mod_base = OTHER; note = 2'-O-Methyl-cytidine
  modified_base 31: mod_base = OTHER; note = 2'-O-Methyl-uridine
  modified_base 32: mod_base = OTHER; note = 2'-O-Methyl-adenosine
  modified_base 34: mod_base = OTHER; note = 2'-O-Methyl-adenosine
  modified_base 35: mod_base = OTHER; note = 2'-O-Methyl-adenosine
  modified_base 36: mod_base = OTHER; note = 2'-O-Methyl-adenosine
  modified_base 37: mod_base = OTHER; note = 2'-O-Methyl-uridine
  modified_base 38: mod_base = OTHER; note = 2'-O-Methyl-adenosine
  modified_base 39: mod_base = OTHER; note = 2'-O-Methyl-guanosine
  modified_base 40: mod_base = OTHER; note = 2'-O-Methyl-cytidine
  modified_base 41: mod_base = OTHER; note = 2'-O-Methyl-adenosine
  modified_base 42: mod_base = OTHER; note = 2'-O-Methyl-adenosine
  modified_base 46: mod_base = OTHER; note = 2'-O-Methyl-adenosine
  modified_base 48: mod_base = OTHER; note = 2'-O-Methyl-adenosine
  modified_base 50: mod_base = OTHER; note = 2'-O-Methyl-uridine
  modified_base 52: mod_base = OTHER; note = 2'-O-Methyl-adenosine
  modified_base 53: mod_base = OTHER; note = 2'-O-Methyl-guanosine
  modified_base 54: mod_base = OTHER; note = 2'-O-Methyl-guanosine
  modified_base 55: mod_base = OTHER; note = 2'-O-Methyl-cytidine
  modified_base 56: mod_base = OTHER; note = 2'-O-Methyl-uridine
  modified_base 57: mod_base = OTHER; note = 2'-O-Methyl-adenosine
  modified_base 60: mod_base = OTHER; note = 2'-O-Methyl-cytidine
  modified_base 61: mod_base = OTHER; note = 2'-O-Methyl-cytidine
  modified_base 66: mod_base = OTHER; note = 2'-O-Methyl-uridine
  modified_base 67: mod_base = OTHER; note = 2'-O-Methyl-cytidine
  modified_base 70: mod_base = OTHER; note = 2'-O-Methyl-cytidine
  modified_base 71: mod_base = OTHER; note = 2'-O-Methyl-uridine
  modified_base 72: mod_base = OTHER; note = 2'-O-Methyl-uridine
  modified_base 74: mod_base = OTHER; note = 2'-O-Methyl-adenosine
  modified_base 75: mod_base = OTHER; note = 2'-O-Methyl-adenosine
  modified_base 76: mod_base = OTHER; note = 2'-O-Methyl-adenosine
  modified_base 77: mod_base = OTHER; note = 2'-O-Methyl-adenosine
  modified_base 78: mod_base = OTHER; note = 2'-O-Methyl-adenosine
  modified_base 79: mod_base = OTHER; note = 2'-O-Methyl-guanosine
  modified_base 80: mod_base = OTHER; note = 2'-O-Methyl-uridine
  modified_base 81: mod_base = OTHER; note = 2'-O-Methyl-guanosine
  modified_base 83: mod_base = OTHER; note = 2'-O-Methyl-cytidine
  modified_base 84: mod_base = OTHER; note = 2'-O-Methyl-adenosine
  modified_base 85: mod_base = OTHER; note = 2'-O-Methyl-cytidine
  modified_base 86: mod_base = OTHER; note = 2'-O-Methyl-cytidine
  modified_base 87: mod_base = OTHER; note = 2'-O-Methyl-guanosine
  modified_base 88: mod_base = OTHER; note = 2'-O-Methyl-adenosine
  modified_base 89: mod_base = OTHER; note = 2'-O-Methyl-guanosine
  modified_base 90: mod_base = OTHER; note = 2'-O-Methyl-uridine
  modified_base 91: mod_base = OTHER; note = 2'-O-Methyl-cytidine
  modified_base 92: mod_base = OTHER; note = 2'-O-Methyl-guanosine
  modified_base 93: mod_base = OTHER; note = 2'-O-Methyl-guanosine
  modified_base 94: mod_base = OTHER; note = 2'-O-Methyl-uridine
  modified_base 95: mod_base = OTHER; note = 2'-O-Methyl-guanosine
  modified_base 96: mod_base = OTHER; note = 2'-O-Methyl-cytidine
  modified_base 97: mod_base = OTHER; note = 2'-O-Methyl-uridine
  modified_base 98: mod_base = OTHER; note = 2'-O-Methyl-uridine phosphorothioate
  modified_base 99: mod_base = OTHER; note = 2'-O-Methyl-uridine phosphorothioate
  modified_base 100: mod_base = OTHER; note = 2'-O-Methyl-uridine
  misc_difference 101: note = a, c, g, inosine, u, deoxyadenosine, deoxyguanosine, deoxycytidine, deoxyinosine, thymine, ribonebularine, 2'-O-methylnebularine, or 2'-deoxynebularine
  misc_difference 102: note = a, c, g, inosine, u, deoxyadenosine, deoxyguanosine, deoxycytidine, deoxyinosine, thymine, ribonebularine, 2'-O-methylnebularine, or 2'-deoxynebularine
  misc_difference 103: note = a, c, g, inosine, u, deoxyadenosine, deoxyguanosine, deoxycytidine, deoxyinosine, thymine, ribonebularine, 2'-O-methylnebularine, or 2'-deoxynebularine

SEQ ID NO: 3024 - RNA, 103 nt, synthetic construct; identical to SEQ ID NO: 1796
  source 1..103: mol_type = other RNA
  modified_base 1: mod_base = OTHER; note = 2'-O-Methyl-guanosine phosphorothioate
  modified_base 2: mod_base = OTHER; note = 2'-O-Methyl-adenosine phosphorothioate
  modified_base 3: mod_base = OTHER; note = 2'-O-Methyl-guanosine
  modified_base 21: mod_base = OTHER; note = 2'-O-Methyl-guanosine
  modified_base 28: mod_base = OTHER; note = 2'-O-Methyl-adenosine
  modified_base 29: mod_base = OTHER; note = 2'-O-Methyl-guanosine
  modified_base 30: mod_base = OTHER; note = 2'-O-Methyl-cytidine
  modified_base 31: mod_base = OTHER; note = 2'-O-Methyl-uridine
  modified_base 32: mod_base = OTHER; note = 2'-O-Methyl-adenosine
  modified_base 33: mod_base = OTHER; note = 2'-O-Methyl-guanosine
  modified_base 34: mod_base = OTHER; note = 2'-O-Methyl-adenosine
  modified_base 35: mod_base = OTHER; note = 2'-O-Methyl-adenosine
  modified_base 36: mod_base = OTHER; note = 2'-O-Methyl-adenosine
  modified_base 37: mod_base = OTHER; note = 2'-O-Methyl-uridine
  modified_base 38: mod_base = OTHER; note = 2'-O-Methyl-adenosine
  modified_base 39: mod_base = OTHER; note = 2'-O-Methyl-guanosine
  modified_base 40: mod_base = OTHER; note = 2'-O-Methyl-cytidine
  modified_base 41: mod_base = OTHER; note = 2'-O-Methyl-adenosine
  modified_base 42: mod_base = OTHER; note = 2'-O-Methyl-adenosine
  modified_base 46: mod_base = OTHER; note = 2'-O-Methyl-adenosine
  modified_base 48: mod_base = OTHER; note = 2'-O-Methyl-adenosine
  modified_base 50: mod_base = OTHER; note = 2'-O-Methyl-uridine
  modified_base 52: mod_base = OTHER; note = 2'-O-Methyl-adenosine
  modified_base 53: mod_base = OTHER; note = 2'-O-Methyl-guanosine
  modified_base 54: mod_base = OTHER; note = 2'-O-Methyl-guanosine
  modified_base 55: mod_base = OTHER; note = 2'-O-Methyl-cytidine
  modified_base 56: mod_base = OTHER; note = 2'-O-Methyl-uridine
  modified_base 57: mod_base = OTHER; note = 2'-O-Methyl-adenosine
  modified_base 60: mod_base = OTHER; note = 2'-O-Methyl-cytidine
  modified_base 61: mod_base = OTHER; note = 2'-O-Methyl-cytidine
  modified_base 66: mod_base = OTHER; note = 2'-O-Methyl-uridine
  modified_base 67: mod_base = OTHER; note = 2'-O-Methyl-cytidine
  modified_base 70: mod_base = OTHER; note = 2'-O-Methyl-cytidine
  modified_base 71: mod_base = OTHER; note = 2'-O-Methyl-uridine
  modified_base 72: mod_base = OTHER; note = 2'-O-Methyl-uridine
  modified_base 73: mod_base = OTHER; note = 2'-O-Methyl-guanosine
  modified_base 74: mod_base = OTHER; note = 2'-O-Methyl-adenosine
  modified_base 75: mod_base = OTHER; note = 2'-O-Methyl-adenosine
  modified_base 76: mod_base = OTHER; note = 2'-O-Methyl-adenosine
  modified_base 77: mod_base = OTHER; note = 2'-O-Methyl-adenosine
  modified_base 78: mod_base = OTHER; note = 2'-O-Methyl-adenosine
  modified_base 79: mod_base = OTHER; note = 2'-O-Methyl-guanosine
  modified_base 80: mod_base = OTHER; note = 2'-O-Methyl-uridine
  modified_base 81: mod_base = OTHER; note = 2'-O-Methyl-guanosine
  modified_base 83: mod_base = OTHER; note = 2'-O-Methyl-cytidine
  modified_base 84: mod_base = OTHER; note = 2'-O-Methyl-adenosine
  modified_base 85: mod_base = OTHER; note = 2'-O-Methyl-cytidine
  modified_base 86: mod_base = OTHER; note = 2'-O-Methyl-cytidine
  modified_base 87: mod_base = OTHER; note = 2'-O-Methyl-guanosine
  modified_base 88: mod_base = OTHER; note = 2'-O-Methyl-adenosine
  modified_base 89: mod_base = OTHER; note = 2'-O-Methyl-guanosine
  modified_base 90: mod_base = OTHER; note = 2'-O-Methyl-uridine
  modified_base 91: mod_base = OTHER; note = 2'-O-Methyl-cytidine
  modified_base 92: mod_base = OTHER; note = 2'-O-Methyl-guanosine
  modified_base 93: mod_base = OTHER; note = 2'-O-Methyl-guanosine
  modified_base 94: mod_base = OTHER; note = 2'-O-Methyl-uridine
  modified_base 95: mod_base = OTHER; note = 2'-O-Methyl-guanosine
  modified_base 96: mod_base = OTHER; note = 2'-O-Methyl-cytidine
  modified_base 97: mod_base = OTHER; note = 2'-O-Methyl-uridine
  modified_base 98: mod_base = OTHER; note = 2'-O-Methyl-uridine phosphorothioate
  modified_base 99: mod_base = OTHER; note = 2'-O-Methyl-uridine phosphorothioate
  modified_base 100: mod_base = OTHER; note = 2'-O-Methyl-uridine
  misc_difference 101: note = a, c, g, inosine, u, deoxyadenosine, deoxyguanosine, deoxycytidine, deoxyinosine, thymine, ribonebularine, 2'-O-methylnebularine, or 2'-deoxynebularine
  misc_difference 102: note = a, c, g, inosine, u, deoxyadenosine, deoxyguanosine, deoxycytidine, deoxyinosine, thymine, ribonebularine, 2'-O-methylnebularine, or 2'-deoxynebularine
  misc_difference 103: note = a, c, g, inosine, u, deoxyadenosine, deoxyguanosine, deoxycytidine, deoxyinosine, thymine, ribonebularine, 2'-O-methylnebularine, or 2'-deoxynebularine

SEQ ID NO: 3025 - RNA, 103 nt, synthetic construct; identical to SEQ ID NO: 1796
  source 1..103: mol_type = other RNA
  modified_base 1: mod_base = OTHER; note = 2'-O-Methyl-guanosine phosphorothioate
  modified_base 2: mod_base = OTHER; note = 2'-O-Methyl-adenosine phosphorothioate
  modified_base 3: mod_base = OTHER; note = 2'-O-Methyl-guanosine
  modified_base 21: mod_base = OTHER; note = 2'-O-Methyl-guanosine
  modified_base 28: mod_base = OTHER; note = 2'-O-Methyl-adenosine
  modified_base 29: mod_base = OTHER; note = 2'-O-Methyl-guanosine
  modified_base 30: mod_base = OTHER; note = 2'-O-Methyl-cytidine
  modified_base 31: mod_base = OTHER; note = 2'-O-Methyl-uridine
  modified_base 32: mod_base = OTHER; note = 2'-O-Methyl-adenosine
  modified_base 34: mod_base = OTHER; note = 2'-O-Methyl-adenosine
  modified_base 35: mod_base = OTHER; note = 2'-O-Methyl-adenosine
  modified_base 36: mod_base = OTHER; note = 2'-O-Methyl-adenosine
  modified_base 37: mod_base = OTHER; note = 2'-O-Methyl-uridine
  modified_base 38: mod_base = OTHER; note = 2'-O-Methyl-adenosine
  modified_base 39: mod_base = OTHER; note = 2'-O-Methyl-guanosine
  modified_base 40: mod_base = OTHER; note = 2'-O-Methyl-cytidine
  modified_base 41: mod_base = OTHER; note = 2'-O-Methyl-adenosine
  modified_base 42: mod_base = OTHER; note = 2'-O-Methyl-adenosine
  modified_base 46: mod_base = OTHER; note = 2'-O-Methyl-adenosine
  modified_base 48: mod_base = OTHER; note = 2'-O-Methyl-adenosine
  modified_base 50: mod_base = OTHER; note = 2'-O-Methyl-uridine
  modified_base 52: mod_base = OTHER; note = 2'-O-Methyl-adenosine
  modified_base 53: mod_base = OTHER; note = 2'-O-Methyl-guanosine
  modified_base 54: mod_base = OTHER; note = 2'-O-Methyl-guanosine
  modified_base 55: mod_base = OTHER; note = 2'-O-Methyl-cytidine
  modified_base 56: mod_base = OTHER; note = 2'-O-Methyl-uridine
  modified_base 57: mod_base = OTHER; note = 2'-O-Methyl-adenosine
  modified_base 60: mod_base = OTHER; note = 2'-O-Methyl-cytidine
  modified_base 61: mod_base = OTHER; note = 2'-O-Methyl-cytidine
  modified_base 66: mod_base = OTHER; note = 2'-O-Methyl-uridine
  modified_base 67: mod_base = OTHER; note = 2'-O-Methyl-cytidine
  modified_base 70: mod_base = OTHER; note = 2'-O-Methyl-cytidine
  modified_base 71: mod_base = OTHER; note = 2'-O-Methyl-uridine
  modified_base 72: mod_base = OTHER; note = 2'-O-Methyl-uridine
  modified_base 74: mod_base = OTHER; note = 2'-O-Methyl-adenosine
  modified_base 75: mod_base = OTHER; note = 2'-O-Methyl-adenosine
  modified_base 76: mod_base = OTHER; note = 2'-O-Methyl-adenosine
  modified_base 77: mod_base = OTHER; note = 2'-O-Methyl-adenosine
  modified_base 78: mod_base = OTHER; note = 2'-O-Methyl-adenosine
  modified_base 79: mod_base = OTHER; note = 2'-O-Methyl-guanosine
  modified_base 80: mod_base = OTHER; note = 2'-O-Methyl-uridine
  modified_base 81: mod_base = OTHER; note = 2'-O-Methyl-guanosine
  modified_base 83: mod_base = OTHER; note = 2'-O-Methyl-cytidine
  modified_base 84: mod_base = OTHER; note = 2'-O-Methyl-adenosine
  modified_base 85: mod_base = OTHER; note = 2'-O-Methyl-cytidine
  modified_base 86: mod_base = OTHER; note = 2'-O-Methyl-cytidine
  modified_base 87: mod_base = OTHER; note = 2'-O-Methyl-guanosine
  modified_base 88: mod_base = OTHER; note = 2'-O-Methyl-adenosine
  modified_base 89: mod_base = OTHER; note = 2'-O-Methyl-guanosine
  modified_base 90: mod_base = OTHER; note = 2'-O-Methyl-uridine
  modified_base 91: mod_base = OTHER; note = 2'-O-Methyl-cytidine
  modified_base 92: mod_base = OTHER; note = 2'-O-Methyl-guanosine
  modified_base 93: mod_base = OTHER; note = 2'-O-Methyl-guanosine
  modified_base 94: mod_base = OTHER; note = 2'-O-Methyl-uridine
  modified_base 95: mod_base = OTHER; note = 2'-O-Methyl-guanosine
  modified_base 96: mod_base = OTHER; note = 2'-O-Methyl-cytidine
  modified_base 97: mod_base = OTHER; note = 2'-O-Methyl-uridine
  modified_base 98: mod_base = OTHER; note = 2'-O-Methyl-uridine phosphorothioate
  modified_base 99: mod_base = OTHER; note = 2'-O-Methyl-uridine phosphorothioate
  modified_base 100: mod_base = OTHER; note = 2'-O-Methyl-uridine
  misc_difference 101: note = a, c, g, inosine, u, deoxyadenosine, deoxyguanosine, deoxycytidine, deoxyinosine, thymine, ribonebularine, 2'-O-methylnebularine, or 2'-deoxynebularine
  misc_difference 102: note = a, c, g, inosine, u, deoxyadenosine, deoxyguanosine, deoxycytidine, deoxyinosine, thymine, ribonebularine, 2'-O-methylnebularine, or 2'-deoxynebularine
  misc_difference 103: note = a, c, g, inosine, u, deoxyadenosine, deoxyguanosine, deoxycytidine, deoxyinosine, thymine, ribonebularine, 2'-O-methylnebularine, or 2'-deoxynebularine

SEQ ID NO: 3026 - RNA, 103 nt, synthetic construct; identical to SEQ ID NO: 1797
  source 1..103: mol_type = other RNA
  modified_base 1: mod_base = OTHER; note = 2'-O-Methyl-cytidine phosphorothioate
  modified_base 2: mod_base = OTHER; note = 2'-O-Methyl-adenosine phosphorothioate
  modified_base 3: mod_base = OTHER; note = 2'-O-Methyl-guanosine
  modified_base 21: mod_base = OTHER; note = 2'-O-Methyl-guanosine
  modified_base 28: mod_base = OTHER; note = 2'-O-Methyl-adenosine
  modified_base 29: mod_base = OTHER; note = 2'-O-Methyl-guanosine
  modified_base 30: mod_base = OTHER; note = 2'-O-Methyl-cytidine
  modified_base 31: mod_base = OTHER; note = 2'-O-Methyl-uridine
  modified_base 32: mod_base = OTHER; note = 2'-O-Methyl-adenosine
  modified_base 34: mod_base = OTHER; note = 2'-O-Methyl-adenosine
  modified_base 35: mod_base = OTHER; note = 2'-O-Methyl-adenosine
  modified_base 36: mod_base = OTHER; note = 2'-O-Methyl-adenosine
  modified_base 37: mod_base = OTHER; note = 2'-O-Methyl-uridine
  modified_base 38: mod_base = OTHER; note = 2'-O-Methyl-adenosine
  modified_base 39: mod_base = OTHER; note = 2'-O-Methyl-guanosine
  modified_base 40: mod_base = OTHER; note = 2'-O-Methyl-cytidine
  modified_base 41: mod_base = OTHER; note = 2'-O-Methyl-adenosine
  modified_base 42: mod_base = OTHER; note = 2'-O-Methyl-adenosine
  modified_base 46: mod_base = OTHER; note = 2'-O-Methyl-adenosine
  modified_base 48: mod_base = OTHER; note = 2'-O-Methyl-adenosine
  modified_base 50: mod_base = OTHER; note = 2'-O-Methyl-uridine
  modified_base 52: mod_base = OTHER; note = 2'-O-Methyl-adenosine
  modified_base 53: mod_base = OTHER; note = 2'-O-Methyl-guanosine
  modified_base 54: mod_base = OTHER; note = 2'-O-Methyl-guanosine
  modified_base 55: mod_base = OTHER; note = 2'-O-Methyl-cytidine
  modified_base 56: mod_base = OTHER; note = 2'-O-Methyl-uridine
  modified_base 57: mod_base = OTHER; note = 2'-O-Methyl-adenosine
  modified_base 60: mod_base = OTHER; note = 2'-O-Methyl-cytidine
  modified_base 61: mod_base = OTHER; note = 2'-O-Methyl-cytidine
  modified_base 66: mod_base = OTHER; note = 2'-O-Methyl-uridine
  modified_base 67: mod_base = OTHER; note = 2'-O-Methyl-cytidine
  modified_base 70: mod_base = OTHER; note = 2'-O-Methyl-cytidine
  modified_base 71: mod_base = OTHER; note = 2'-O-Methyl-uridine
  modified_base 72: mod_base = OTHER; note = 2'-O-Methyl-uridine
  modified_base 74: mod_base = OTHER; note = 2'-O-Methyl-adenosine
  modified_base 75: mod_base = OTHER; note = 2'-O-Methyl-adenosine
  modified_base 76: mod_base = OTHER; note = 2'-O-Methyl-adenosine
  modified_base 77: mod_base = OTHER; note = 2'-O-Methyl-adenosine
  modified_base 78: mod_base = OTHER; note = 2'-O-Methyl-adenosine
  modified_base 79: mod_base = OTHER; note = 2'-O-Methyl-guanosine
  modified_base 80: mod_base = OTHER; note = 2'-O-Methyl-uridine
  modified_base 81: mod_base = OTHER; note = 2'-O-Methyl-guanosine
  modified_base 83: mod_base = OTHER; note = 2'-O-Methyl-cytidine
  modified_base 84: mod_base = OTHER; note = 2'-O-Methyl-adenosine
  modified_base 85: mod_base = OTHER; note = 2'-O-Methyl-cytidine
  modified_base 86: mod_base = OTHER; note = 2'-O-Methyl-cytidine
  modified_base 87: mod_base = OTHER; note = 2'-O-Methyl-guanosine
  modified_base 88: mod_base = OTHER; note = 2'-O-Methyl-adenosine
  modified_base 89: mod_base = OTHER; note = 2'-O-Methyl-guanosine
  modified_base 90: mod_base = OTHER; note = 2'-O-Methyl-uridine
  modified_base 91: mod_base = OTHER; note = 2'-O-Methyl-cytidine
  modified_base 92: mod_base = OTHER; note = 2'-O-Methyl-guanosine
  modified_base 93: mod_base = OTHER; note = 2'-O-Methyl-guanosine
  modified_base 94: mod_base = OTHER; note = 2'-O-Methyl-uridine
  modified_base 95: mod_base = OTHER; note = 2'-O-Methyl-guanosine
  modified_base 96: mod_base = OTHER; note = 2'-O-Methyl-cytidine
  modified_base 97: mod_base = OTHER; note = 2'-O-Methyl-uridine
  modified_base 98: mod_base = OTHER; note = 2'-O-Methyl-uridine phosphorothioate
  modified_base 99: mod_base = OTHER; note = 2'-O-Methyl-uridine phosphorothioate
  modified_base 100: mod_base = OTHER; note = 2'-O-Methyl-uridine
  misc_difference 101: note = a, c, g, inosine, u, deoxyadenosine, deoxyguanosine, deoxycytidine, deoxyinosine, thymine, ribonebularine, 2'-O-methylnebularine, or 2'-deoxynebularine
  misc_difference 102: note = a, c, g, inosine, u, deoxyadenosine, deoxyguanosine, deoxycytidine, deoxyinosine, thymine, ribonebularine, 2'-O-methylnebularine, or 2'-deoxynebularine
  misc_difference 103: note = a, c, g, inosine, u, deoxyadenosine, deoxyguanosine, deoxycytidine, deoxyinosine, thymine, ribonebularine, 2'-O-methylnebularine, or 2'-deoxynebularine

SEQ ID NO: 3027 - RNA, 103 nt, synthetic construct; identical to SEQ ID NO: 1797
  source 1..103: mol_type = other RNA
  modified_base 1: mod_base = OTHER; note = 2'-O-Methyl-cytidine phosphorothioate
  modified_base 2: mod_base = OTHER; note = 2'-O-Methyl-adenosine phosphorothioate
  modified_base 3: mod_base = OTHER; note = 2'-O-Methyl-guanosine
  modified_base 21: mod_base = OTHER; note = 2'-O-Methyl-guanosine
  modified_base 28: mod_base = OTHER; note = 2'-O-Methyl-adenosine
  modified_base 29: mod_base = OTHER; note = 2'-O-Methyl-guanosine
  modified_base 30: mod_base = OTHER; note = 2'-O-Methyl-cytidine
  modified_base 31: mod_base = OTHER; note = 2'-O-Methyl-uridine
  modified_base 32: mod_base = OTHER; note = 2'-O-Methyl-adenosine
  modified_base 33: mod_base = OTHER; note = 2'-O-Methyl-guanosine
  modified_base 34: mod_base = OTHER; note = 2'-O-Methyl-adenosine
  modified_base 35: mod_base = OTHER; note = 2'-O-Methyl-adenosine
  modified_base 36: mod_base = OTHER; note = 2'-O-Methyl-adenosine
  modified_base 37: mod_base = OTHER; note = 2'-O-Methyl-uridine
  modified_base 38: mod_base = OTHER; note = 2'-O-Methyl-adenosine
  modified_base 39: mod_base = OTHER; note = 2'-O-Methyl-guanosine
  modified_base 40: mod_base = OTHER; note = 2'-O-Methyl-cytidine
  modified_base 41: mod_base = OTHER; note = 2'-O-Methyl-adenosine
  modified_base 42: mod_base = OTHER; note = 2'-O-Methyl-adenosine
  modified_base 46: mod_base = OTHER; note = 2'-O-Methyl-adenosine
  modified_base 48: mod_base = OTHER; note = 2'-O-Methyl-adenosine
  modified_base 50: mod_base = OTHER; note = 2'-O-Methyl-uridine
  modified_base 52: mod_base = OTHER; note = 2'-O-Methyl-adenosine
  modified_base 53: mod_base = OTHER; note = 2'-O-Methyl-guanosine
  modified_base 54: mod_base = OTHER; note = 2'-O-Methyl-guanosine
  modified_base 57: mod_base = OTHER; note = 2'-O-Methyl-adenosine
  modified_base 61: mod_base = OTHER; note = 2'-O-Methyl-cytidine
  modified_base 66: mod_base = OTHER; note = 2'-O-Methyl-uridine
  modified_base 67: mod_base = OTHER; note = 2'-O-Methyl-cytidine
  modified_base 70: mod_base = OTHER; note = 2'-O-Methyl-cytidine
  modified_base 71: mod_base = OTHER; note = 2'-O-Methyl-uridine
  modified_base 72: mod_base = OTHER; note = 2'-O-Methyl-uridine
  modified_base 74: mod_base = OTHER; note = 2'-O-Methyl-adenosine
  modified_base 75: mod_base = OTHER; note = 2'-O-Methyl-adenosine
  modified_base 76: mod_base = OTHER; note = 2'-O-Methyl-adenosine
  modified_base 77: mod_base = OTHER; note = 2'-O-Methyl-adenosine
  modified_base 78: mod_base = OTHER; note = 2'-O-Methyl-adenosine
  modified_base 79: mod_base = OTHER; note = 2'-O-Methyl-guanosine
  modified_base 80: mod_base = OTHER; note = 2'-O-Methyl-uridine
  modified_base 82: mod_base = OTHER; note = 2'-O-Methyl-guanosine
  modified_base 83: mod_base = OTHER; note = 2'-O-Methyl-cytidine
  modified_base 84: mod_base = OTHER; note = 2'-O-Methyl-adenosine
  modified_base 85: mod_base = OTHER; note = 2'-O-Methyl-cytidine
  modified_base 86: mod_base = OTHER; note = 2'-O-Methyl-cytidine
  modified_base 87: mod_base = OTHER; note = 2'-O-Methyl-guanosine
  modified_base 89: mod_base = OTHER; note = 2'-O-Methyl-guanosine
  modified_base 92: mod_base = OTHER; note = 2'-O-Methyl-guanosine
  modified_base 93: mod_base = OTHER; note = 2'-O-Methyl-guanosine
  modified_base 94: mod_base = OTHER; note = 2'-O-Methyl-uridine
  modified_base 95: mod_base = OTHER; note = 2'-O-Methyl-guanosine
  modified_base 96: mod_base = OTHER; note = 2'-O-Methyl-cytidine
  modified_base 97: mod_base = OTHER; note = 2'-O-Methyl-uridine
  modified_base 98: mod_base = OTHER; note = 2'-O-Methyl-uridine phosphorothioate
  modified_base 99: mod_base = OTHER; note = 2'-O-Methyl-uridine phosphorothioate
  modified_base 100: mod_base = OTHER; note = 2'-O-Methyl-uridine
  misc_difference 101: note = a, c, g, inosine, u, deoxyadenosine, deoxyguanosine, deoxycytidine, deoxyinosine, thymine, ribonebularine, 2'-O-methylnebularine, or 2'-deoxynebularine
  misc_difference 102: note = a, c, g, inosine, u, deoxyadenosine, deoxyguanosine, deoxycytidine, deoxyinosine, thymine, ribonebularine, 2'-O-methylnebularine, or 2'-deoxynebularine
  misc_difference 103: note = a, c, g, inosine, u, deoxyadenosine, deoxyguanosine, deoxycytidine, deoxyinosine, thymine, ribonebularine, 2'-O-methylnebularine, or 2'-deoxynebularine

SEQ ID NO: 3028 - RNA, 103 nt, synthetic construct; identical to SEQ ID NO: 1797
  source 1..103: mol_type = other RNA
  modified_base 1: mod_base = OTHER; note = 2'-O-Methyl-cytidine phosphorothioate
  modified_base 2: mod_base = OTHER; note = 2'-O-Methyl-adenosine phosphorothioate
  modified_base 3: mod_base = OTHER; note = 2'-O-Methyl-guanosine
  modified_base 21: mod_base = OTHER; note = 2'-O-Methyl-guanosine
  modified_base 28: mod_base = OTHER; note = 2'-O-Methyl-adenosine
  modified_base 29: mod_base = OTHER; note = 2'-O-Methyl-guanosine
  modified_base 30: mod_base = OTHER; note = 2'-O-Methyl-cytidine
  modified_base 31: mod_base = OTHER; note = 2'-O-Methyl-uridine
  modified_base 32: mod_base = OTHER; note = 2'-O-Methyl-adenosine
  modified_base 33: mod_base = OTHER; note = 2'-O-Methyl-guanosine
  modified_base 34: mod_base = OTHER; note = 2'-O-Methyl-adenosine
  modified_base 35: mod_base = OTHER; note = 2'-O-Methyl-adenosine
  modified_base 36: mod_base = OTHER; note = 2'-O-Methyl-adenosine
  modified_base 37: mod_base = OTHER; note = 2'-O-Methyl-uridine
  modified_base 38: mod_base = OTHER; note = 2'-O-Methyl-adenosine
  modified_base 39: mod_base = OTHER; note = 2'-O-Methyl-guanosine
  modified_base 40: mod_base = OTHER; note = 2'-O-Methyl-cytidine
  modified_base 41: mod_base = OTHER; note = 2'-O-Methyl-adenosine
  modified_base 42: mod_base = OTHER; note = 2'-O-Methyl-adenosine
  modified_base 46: mod_base = OTHER; note = 2'-O-Methyl-adenosine
  modified_base 48: mod_base = OTHER; note = 2'-O-Methyl-adenosine
  modified_base 50: mod_base = OTHER; note = 2'-O-Methyl-uridine
  modified_base 52: mod_base = OTHER; note = 2'-O-Methyl-adenosine
  modified_base 53: mod_base = OTHER; note = 2'-O-Methyl-guanosine
  modified_base 54: mod_base = OTHER; note = 2'-O-Methyl-guanosine
  modified_base 55: mod_base = OTHER; note = 2'-O-Methyl-cytidine
  modified_base 56: mod_base = OTHER; note = 2'-O-Methyl-uridine
  modified_base 57: mod_base = OTHER; note = 2'-O-Methyl-adenosine
  modified_base 60: mod_base = OTHER; note = 2'-O-Methyl-cytidine
  modified_base 61: mod_base = OTHER; note = 2'-O-Methyl-cytidine
  modified_base 66: mod_base = OTHER; note = 2'-O-Methyl-uridine
  modified_base 67: mod_base = OTHER; note = 2'-O-Methyl-cytidine
  modified_base 70: mod_base = OTHER; note = 2'-O-Methyl-cytidine
  modified_base 71: mod_base = OTHER; note = 2'-O-Methyl-uridine
  modified_base 72: mod_base = OTHER; note = 2'-O-Methyl-uridine
  modified_base 74: mod_base = OTHER; note = 2'-O-Methyl-adenosine
  modified_base 75: mod_base = OTHER; note = 2'-O-Methyl-adenosine
  modified_base 76: mod_base = OTHER; note = 2'-O-Methyl-adenosine
  modified_base 77: mod_base = OTHER; note = 2'-O-Methyl-adenosine
  modified_base 78: mod_base = OTHER; note = 2'-O-Methyl-adenosine
  modified_base 79: mod_base = OTHER; note = 2'-O-Methyl-guanosine
  modified_base 80: mod_base = OTHER; note = 2'-O-Methyl-uridine
  modified_base 82: mod_base = OTHER; note = 2'-O-Methyl-guanosine
  modified_base 83: mod_base = OTHER; note = 2'-O-Methyl-cytidine
  modified_base 84: mod_base = OTHER; note = 2'-O-Methyl-adenosine
  modified_base 85: mod_base = OTHER; note = 2'-O-Methyl-cytidine
  modified_base 86: mod_base = OTHER; note = 2'-O-Methyl-cytidine
  modified_base 87: mod_base = OTHER; note = 2'-O-Methyl-guanosine
  modified_base 89: mod_base = OTHER; note = 2'-O-Methyl-guanosine
  modified_base 92: mod_base = OTHER; note = 2'-O-Methyl-guanosine
  modified_base 93: mod_base = OTHER; note = 2'-O-Methyl-guanosine
  modified_base 94: mod_base = OTHER; note = 2'-O-Methyl-uridine
  modified_base 95: mod_base = OTHER; note = 2'-O-Methyl-guanosine
  modified_base 96: mod_base = OTHER; note = 2'-O-Methyl-cytidine
  modified_base 97: mod_base = OTHER; note = 2'-O-Methyl-uridine
  modified_base 98: mod_base = OTHER; note = 2'-O-Methyl-uridine phosphorothioate
  modified_base 99: mod_base = OTHER; note = 2'-O-Methyl-uridine phosphorothioate
  modified_base 100: mod_base = OTHER; note = 2'-O-Methyl-uridine
  misc_difference 101: note = a, c, g, inosine, u, deoxyadenosine, deoxyguanosine, deoxycytidine, deoxyinosine, thymine, ribonebularine, 2'-O-methylnebularine, or 2'-deoxynebularine
  misc_difference 102: note = a, c, g, inosine, u, deoxyadenosine, deoxyguanosine, deoxycytidine, deoxyinosine, thymine, ribonebularine, 2'-O-methylnebularine, or 2'-deoxynebularine
  misc_difference 103: note = a, c, g, inosine, u, deoxyadenosine, deoxyguanosine, deoxycytidine, deoxyinosine, thymine, ribonebularine, 2'-O-methylnebularine, or 2'-deoxynebularine

SEQ ID NO: 3029 - RNA, 103 nt, synthetic construct; identical to SEQ ID NO: 1797
  source 1..103: mol_type = other RNA
  modified_base 1: mod_base = OTHER; note = 2'-O-Methyl-cytidine phosphorothioate
  modified_base 2: mod_base = OTHER; note = 2'-O-Methyl-adenosine phosphorothioate
  modified_base 3: mod_base = OTHER; note = 2'-O-Methyl-guanosine
  modified_base 21: mod_base = OTHER; note = 2'-O-Methyl-guanosine
  modified_base 28: mod_base = OTHER; note = 2'-O-Methyl-adenosine
  modified_base 29: mod_base = OTHER; note = 2'-O-Methyl-guanosine
  modified_base 30: mod_base = OTHER; note = 2'-O-Methyl-cytidine
  modified_base 31: mod_base = OTHER; note = 2'-O-Methyl-uridine
  modified_base 32: mod_base = OTHER; note = 2'-O-Methyl-adenosine
  modified_base 33: mod_base = OTHER; note = 2'-O-Methyl-guanosine
  modified_base 34: mod_base = OTHER; note = 2'-O-Methyl-adenosine
  modified_base 35: mod_base = OTHER; note = 2'-O-Methyl-adenosine
  modified_base 36: mod_base = OTHER; note = 2'-O-Methyl-adenosine
  modified_base 37: mod_base = OTHER; note = 2'-O-Methyl-uridine
  modified_base 38: mod_base = OTHER; note = 2'-O-Methyl-adenosine
  modified_base 39: mod_base = OTHER; note = 2'-O-Methyl-guanosine
  modified_base 40: mod_base = OTHER; note = 2'-O-Methyl-cytidine
  modified_base 41: mod_base = OTHER; note = 2'-O-Methyl-adenosine
  modified_base 42: mod_base = OTHER; note = 2'-O-Methyl-adenosine
  modified_base 46: mod_base = OTHER; note = 2'-O-Methyl-adenosine
  modified_base 48: mod_base = OTHER; note = 2'-O-Methyl-adenosine
  modified_base 50: mod_base = OTHER; note = 2'-O-Methyl-uridine
  modified_base 52: mod_base = OTHER; note = 2'-O-Methyl-adenosine
  modified_base 53: mod_base = OTHER; note = 2'-O-Methyl-guanosine
  modified_base 54: mod_base = OTHER; note = 2'-O-Methyl-guanosine
  modified_base 57: mod_base = OTHER; note = 2'-O-Methyl-adenosine
  modified_base 61: mod_base = OTHER; note = 2'-O-Methyl-cytidine
  modified_base 66: mod_base = OTHER; note = 2'-O-Methyl-uridine
  modified_base 67: mod_base = OTHER; note = 2'-O-Methyl-cytidine
  modified_base 70: mod_base = OTHER; note = 2'-O-Methyl-cytidine
  modified_base 71: mod_base = OTHER; note = 2'-O-Methyl-uridine
  modified_base 72: mod_base = OTHER; note = 2'-O-Methyl-uridine
  modified_base 73: mod_base = OTHER; note = 2'-O-Methyl-guanosine
  modified_base 74: mod_base = OTHER; note = 2'-O-Methyl-adenosine
  modified_base 75: mod_base = OTHER; note = 2'-O-Methyl-adenosine
  modified_base 76: mod_base = OTHER; note = 2'-O-Methyl-adenosine
  modified_base 77: mod_base = OTHER; note = 2'-O-Methyl-adenosine
  modified_base 78: mod_base = OTHER; note = 2'-O-Methyl-adenosine
  modified_base 79: mod_base = OTHER; note = 2'-O-Methyl-guanosine
  modified_base 80: mod_base = OTHER; note = 2'-O-Methyl-uridine
  modified_base 82: mod_base = OTHER; note = 2'-O-Methyl-guanosine
  modified_base 83: mod_base = OTHER; note = 2'-O-Methyl-cytidine
  modified_base 84: mod_base = OTHER; note = 2'-O-Methyl-adenosine
  modified_base 85: mod_base = OTHER; note = 2'-O-Methyl-cytidine
  modified_base 86: mod_base = OTHER; note = 2'-O-Methyl-cytidine
  modified_base 87: mod_base = OTHER; note = 2'-O-Methyl-guanosine
  modified_base 89: mod_base = OTHER; note = 2'-O-Methyl-guanosine
  modified_base 92: mod_base = OTHER; note = 2'-O-Methyl-guanosine
  modified_base 93: mod_base = OTHER; note = 2'-O-Methyl-guanosine
  modified_base 94: mod_base = OTHER; note = 2'-O-Methyl-uridine
  modified_base 95: mod_base = OTHER; note = 2'-O-Methyl-guanosine
  modified_base 96: mod_base = OTHER; note = 2'-O-Methyl-cytidine
  modified_base 97: mod_base = OTHER; note = 2'-O-Methyl-uridine
  modified_base 98: mod_base = OTHER; note = 2'-O-Methyl-uridine phosphorothioate
  modified_base 99: mod_base = OTHER; note = 2'-O-Methyl-uridine phosphorothioate
  modified_base 100: mod_base = OTHER; note = 2'-O-Methyl-uridine
  misc_difference 101: note = a, c, g, inosine, u, deoxyadenosine, deoxyguanosine, deoxycytidine, deoxyinosine, thymine, ribonebularine, 2'-O-methylnebularine, or 2'-deoxynebularine
  misc_difference 102: note = a, c, g, inosine, u, deoxyadenosine, deoxyguanosine, deoxycytidine, deoxyinosine, thymine, ribonebularine, 2'-O-methylnebularine, or 2'-deoxynebularine
  misc_difference 103: note = a, c, g, inosine, u, deoxyadenosine, deoxyguanosine, deoxycytidine, deoxyinosine, thymine, ribonebularine, 2'-O-methylnebularine, or 2'-deoxynebularine

SEQ ID NO: 3030 - RNA, 103 nt, synthetic construct; identical to SEQ ID NO: 1797
  source 1..103: mol_type = other RNA
  modified_base 1: mod_base = OTHER; note = 2'-O-Methyl-cytidine phosphorothioate
  modified_base 2: mod_base = OTHER; note = 2'-O-Methyl-adenosine phosphorothioate
  modified_base 3: mod_base = OTHER; note = 2'-O-Methyl-guanosine
  modified_base 21: mod_base = OTHER; note = 2'-O-Methyl-guanosine
  modified_base 28: mod_base = OTHER; note = 2'-O-Methyl-adenosine
  modified_base 29: mod_base = OTHER; note = 2'-O-Methyl-guanosine
  modified_base 30: mod_base = OTHER; note = 2'-O-Methyl-cytidine
  modified_base 31: mod_base = OTHER; note = 2'-O-Methyl-uridine
  modified_base 32: mod_base = OTHER; note = 2'-O-Methyl-adenosine
  modified_base 33: mod_base = OTHER; note = 2'-O-Methyl-guanosine
  modified_base 34: mod_base = OTHER; note = 2'-O-Methyl-adenosine
  modified_base 35: mod_base = OTHER; note = 2'-O-Methyl-adenosine
  modified_base 36: mod_base = OTHER; note = 2'-O-Methyl-adenosine
  modified_base 37: mod_base = OTHER; note = 2'-O-Methyl-uridine
  modified_base 38: mod_base = OTHER; note = 2'-O-Methyl-adenosine
  modified_base 39: mod_base = OTHER; note = 2'-O-Methyl-guanosine
  modified_base 40: mod_base = OTHER; note = 2'-O-Methyl-cytidine
  modified_base 41: mod_base = OTHER; note = 2'-O-Methyl-adenosine
  modified_base 42: mod_base = OTHER; note = 2'-O-Methyl-adenosine
  modified_base 46: mod_base = OTHER; note = 2'-O-Methyl-adenosine
  modified_base 48: mod_base = OTHER; note = 2'-O-Methyl-adenosine
  modified_base 50: mod_base = OTHER; note = 2'-O-Methyl-uridine
  modified_base 52: mod_base = OTHER; note = 2'-O-Methyl-adenosine
  modified_base 53: mod_base = OTHER; note = 2'-O-Methyl-guanosine
  modified_base 54: mod_base = OTHER; note = 2'-O-Methyl-guanosine
  modified_base 57: mod_base = OTHER; note = 2'-O-Methyl-adenosine
  modified_base 61: mod_base = OTHER; note = 2'-O-Methyl-cytidine
  modified_base 66: mod_base = OTHER; note = 2'-O-Methyl-uridine
  modified_base 67: mod_base = OTHER; note = 2'-O-Methyl-cytidine
  modified_base 70: mod_base = OTHER; note = 2'-O-Methyl-cytidine
  modified_base 71: mod_base = OTHER; note = 2'-O-Methyl-uridine
  modified_base 72: mod_base = OTHER; note = 2'-O-Methyl-uridine
  modified_base 73: mod_base = OTHER; note = 2'-O-Methyl-guanosine
  modified_base 74: mod_base = OTHER; note = 2'-O-Methyl-adenosine
  modified_base 75: mod_base = OTHER; note = 2'-O-Methyl-adenosine
  modified_base 76: mod_base = OTHER; note = 2'-O-Methyl-adenosine
  modified_base 77: mod_base = OTHER; note = 2'-O-Methyl-adenosine
  modified_base 78: mod_base = OTHER; note = 2'-O-Methyl-adenosine
  modified_base 79: mod_base = OTHER; note = 2'-O-Methyl-guanosine
  modified_base 80: mod_base = OTHER; note = 2'-O-Methyl-uridine
  modified_base 82: mod_base = OTHER; note = 2'-O-Methyl-guanosine
  modified_base 83: mod_base = OTHER; note = 2'-O-Methyl-cytidine
  modified_base 84: mod_base = OTHER; note = 2'-O-Methyl-adenosine
  modified_base 85: mod_base = OTHER; note = 2'-O-Methyl-cytidine
  modified_base 86: mod_base = OTHER; note = 2'-O-Methyl-cytidine
  modified_base 87: mod_base = OTHER; note = 2'-O-Methyl-guanosine
  modified_base 89: mod_base = OTHER; note = 2'-O-Methyl-guanosine
  modified_base 91: mod_base = OTHER; note = 2'-O-Methyl-cytidine
  modified_base 92: mod_base = OTHER; note = 2'-O-Methyl-guanosine
  modified_base 93: mod_base = OTHER; note = 2'-O-Methyl-guanosine
  modified_base 94: mod_base = OTHER; note = 2'-O-Methyl-uridine
  modified_base 95: mod_base = OTHER; note = 2'-O-Methyl-guanosine
  modified_base 96: mod_base = OTHER; note = 2'-O-Methyl-cytidine
  modified_base 97: mod_base = OTHER; note = 2'-O-Methyl-uridine
  modified_base 98: mod_base = OTHER; note = 2'-O-Methyl-uridine phosphorothioate
  modified_base 99: mod_base = OTHER; note = 2'-O-Methyl-uridine phosphorothioate
  modified_base 100: mod_base = OTHER; note = 2'-O-Methyl-uridine
  misc_difference 101: note = a, c, g, inosine, u, deoxyadenosine, deoxyguanosine, deoxycytidine, deoxyinosine, thymine, ribonebularine, 2'-O-methylnebularine, or 2'-deoxynebularine
  misc_difference 102: note = a, c, g, inosine, u, deoxyadenosine, deoxyguanosine, deoxycytidine, deoxyinosine, thymine, ribonebularine, 2'-O-methylnebularine, or 2'-deoxynebularine
  misc_difference 103: note = a, c, g, inosine, u, deoxyadenosine, deoxyguanosine, deoxycytidine, deoxyinosine, thymine, ribonebularine, 2'-O-methylnebularine, or 2'-deoxynebularine

SEQ ID NO: 3031 - RNA, 103 nt, synthetic construct; identical to SEQ ID NO: 1797
  source 1..103: mol_type = other RNA
  modified_base 1: mod_base = OTHER; note = 2'-O-Methyl-cytidine phosphorothioate
  modified_base 2: mod_base = OTHER; note = 2'-O-Methyl-adenosine phosphorothioate
  modified_base 3: mod_base = OTHER; note = 2'-O-Methyl-guanosine
  modified_base 21: mod_base = OTHER; note = 2'-O-Methyl-guanosine
  modified_base 28: mod_base = OTHER; note = 2'-O-Methyl-adenosine
  modified_base 29: mod_base = OTHER; note = 2'-O-Methyl-guanosine
  modified_base 30: mod_base = OTHER; note = 2'-O-Methyl-cytidine
  modified_base 31: mod_base = OTHER; note = 2'-O-Methyl-uridine
  modified_base 32: mod_base = OTHER; note = 2'-O-Methyl-adenosine
  modified_base 34: mod_base = OTHER; note = 2'-O-Methyl-adenosine
  modified_base 35: mod_base = OTHER; note = 2'-O-Methyl-adenosine
  modified_base 36: mod_base = OTHER; note = 2'-O-Methyl-adenosine
  modified_base 37: mod_base = OTHER; note = 2'-O-Methyl-uridine
  modified_base 38: mod_base = OTHER; note = 2'-O-Methyl-adenosine
  modified_base 39: mod_base = OTHER; note = 2'-O-Methyl-guanosine
  modified_base 40: mod_base = OTHER; note = 2'-O-Methyl-cytidine
  modified_base 41: mod_base = OTHER; note = 2'-O-Methyl-adenosine
  modified_base 42: mod_base = OTHER; note = 2'-O-Methyl-adenosine
  modified_base 46: mod_base = OTHER; note = 2'-O-Methyl-adenosine
  modified_base 48: mod_base = OTHER; note = 2'-O-Methyl-adenosine
  modified_base 50: mod_base = OTHER; note = 2'-O-Methyl-uridine
  modified_base 52: mod_base = OTHER; note = 2'-O-Methyl-adenosine
  modified_base 53: mod_base = OTHER; note = 2'-O-Methyl-guanosine
  modified_base 54: mod_base = OTHER; note = 2'-O-Methyl-guanosine
  modified_base 57: mod_base = OTHER; note = 2'-O-Methyl-adenosine
  modified_base 61: mod_base = OTHER; note = 2'-O-Methyl-cytidine
  modified_base 66: mod_base = OTHER; note = 2'-O-Methyl-uridine
  modified_base 67: mod_base = OTHER; note = 2'-O-Methyl-cytidine
  modified_base 70: mod_base = OTHER; note = 2'-O-Methyl-cytidine
  modified_base 71: mod_base = OTHER; note = 2'-O-Methyl-uridine
  modified_base 72: mod_base = OTHER; note = 2'-O-Methyl-uridine
  modified_base 73: mod_base = OTHER; note = 2'-O-Methyl-guanosine
  modified_base 74: mod_base = OTHER; note = 2'-O-Methyl-adenosine
  modified_base 75: mod_base = OTHER; note = 2'-O-Methyl-adenosine
  modified_base 76: mod_base = OTHER; note = 2'-O-Methyl-adenosine
  modified_base 77: mod_base = OTHER; note = 2'-O-Methyl-adenosine
  modified_base 78: mod_base = OTHER; note = 2'-O-Methyl-adenosine
  modified_base 79: mod_base = OTHER; note = 2'-O-Methyl-guanosine
  modified_base 80: mod_base = OTHER; note = 2'-O-Methyl-uridine
  modified_base 82: mod_base = OTHER; note = 2'-O-Methyl-guanosine
  modified_base 83: mod_base = OTHER; note = 2'-O-Methyl-cytidine
  modified_base 84: mod_base = OTHER; note = 2'-O-Methyl-adenosine
  modified_base 85: mod_base = OTHER; note = 2'-O-Methyl-cytidine
  modified_base 86: mod_base = OTHER; note = 2'-O-Methyl-cytidine
  modified_base 87: mod_base = OTHER; note = 2'-O-Methyl-guanosine
  modified_base 89: mod_base = OTHER; note = 2'-O-Methyl-guanosine
  modified_base 92: mod_base = OTHER; note = 2'-O-Methyl-guanosine
  modified_base 93: mod_base = OTHER; note = 2'-O-Methyl-guanosine
  modified_base 94: mod_base = OTHER; note = 2'-O-Methyl-uridine
  modified_base 95: mod_base = OTHER; note = 2'-O-Methyl-guanosine
  modified_base 96: mod_base = OTHER; note = 2'-O-Methyl-cytidine
  modified_base 97: mod_base = OTHER; note = 2'-O-Methyl-uridine
  modified_base 98: mod_base = OTHER; note = 2'-O-Methyl-uridine phosphorothioate
  modified_base 99: mod_base = OTHER; note = 2'-O-Methyl-uridine phosphorothioate
  modified_base 100: mod_base = OTHER; note = 2'-O-Methyl-uridine
  misc_difference 101: note = a, c, g, inosine, u, deoxyadenosine, deoxyguanosine, deoxycytidine, deoxyinosine, thymine, ribonebularine, 2'-O-methylnebularine, or 2'-deoxynebularine
  misc_difference 102: note = a, c, g, inosine, u, deoxyadenosine, deoxyguanosine, deoxycytidine, deoxyinosine, thymine, ribonebularine, 2'-O-methylnebularine, or 2'-deoxynebularine
  misc_difference 103: note = a, c, g, inosine, u, deoxyadenosine, deoxyguanosine, deoxycytidine, deoxyinosine, thymine, ribonebularine, 2'-O-methylnebularine, or 2'-deoxynebularine

SEQ ID NO: 3032 - RNA, 103 nt, synthetic construct; identical to SEQ ID NO: 1797
  source 1..103: mol_type = other RNA
  modified_base 1: mod_base = OTHER; note = 2'-O-Methyl-cytidine phosphorothioate
  modified_base 2: mod_base = OTHER; note = 2'-O-Methyl-adenosine phosphorothioate
  modified_base 3: mod_base = OTHER; note = 2'-O-Methyl-guanosine
  modified_base 21: mod_base = OTHER; note = 2'-O-Methyl-guanosine
  modified_base 28: mod_base = OTHER; note = 2'-O-Methyl-adenosine
  modified_base 29: mod_base = OTHER; note = 2'-O-Methyl-guanosine
  modified_base 30: mod_base = OTHER; note = 2'-O-Methyl-cytidine
  modified_base 31: mod_base = OTHER; note = 2'-O-Methyl-uridine
  modified_base 32: mod_base = OTHER; note = 2'-O-Methyl-adenosine
  modified_base 34: mod_base = OTHER; note = 2'-O-Methyl-adenosine
  modified_base 35: mod_base = OTHER; note = 2'-O-Methyl-adenosine
  modified_base 36: mod_base = OTHER; note = 2'-O-Methyl-adenosine
  modified_base 37: mod_base = OTHER; note = 2'-O-Methyl-uridine
  modified_base 38: mod_base = OTHER; note = 2'-O-Methyl-adenosine
  modified_base 39: mod_base = OTHER; note = 2'-O-Methyl-guanosine
  modified_base 40: mod_base = OTHER; note = 2'-O-Methyl-cytidine
  modified_base 41: mod_base = OTHER; note = 2'-O-Methyl-adenosine
  modified_base 42: mod_base = OTHER; note = 2'-O-Methyl-adenosine
  modified_base 46: mod_base = OTHER; note = 2'-O-Methyl-adenosine
  modified_base 48: mod_base = OTHER; note = 2'-O-Methyl-adenosine
  modified_base 50: mod_base = OTHER; note = 2'-O-Methyl-uridine
  modified_base 52: mod_base = OTHER; note = 2'-O-Methyl-adenosine
  modified_base 53: mod_base = OTHER; note = 2'-O-Methyl-guanosine
  modified_base 54: mod_base = OTHER; note = 2'-O-Methyl-guanosine
  modified_base 57: mod_base = OTHER; note = 2'-O-Methyl-adenosine
  modified_base 61: mod_base = OTHER; note = 2'-O-Methyl-cytidine
  modified_base 66: mod_base = OTHER; note = 2'-O-Methyl-uridine
  modified_base 67: mod_base = OTHER; note = 2'-O-Methyl-cytidine
  modified_base 70: mod_base = OTHER; note = 2'-O-Methyl-cytidine
  modified_base 71: mod_base = OTHER; note = 2'-O-Methyl-uridine
  modified_base 72: mod_base = OTHER; note = 2'-O-Methyl-uridine
  modified_base 73: mod_base = OTHER; note = 2'-O-Methyl-guanosine
  modified_base 74: mod_base = OTHER; note = 2'-O-Methyl-adenosine
  modified_base 75: mod_base = OTHER; note = 2'-O-Methyl-adenosine
  modified_base 76: mod_base = OTHER; note = 2'-O-Methyl-adenosine
  modified_base 77: mod_base = OTHER; note = 2'-O-Methyl-adenosine
  modified_base 78: mod_base = OTHER; note = 2'-O-Methyl-adenosine
  modified_base 79: mod_base = OTHER; note = 2'-O-Methyl-guanosine
  modified_base 80: mod_base = OTHER; note = 2'-O-Methyl-uridine
  modified_base 82: mod_base = OTHER; note = 2'-O-Methyl-guanosine
  modified_base 83: mod_base = OTHER; note = 2'-O-Methyl-cytidine
  modified_base 84: mod_base = OTHER; note = 2'-O-Methyl-adenosine
  modified_base 85: mod_base = OTHER; note = 2'-O-Methyl-cytidine
  modified_base 86: mod_base = OTHER; note = 2'-O-Methyl-cytidine
  modified_base 87: mod_base = OTHER; note = 2'-O-Methyl-guanosine
  modified_base 89: mod_base = OTHER; note = 2'-O-Methyl-guanosine
  modified_base 91: mod_base = OTHER; note = 2'-O-Methyl-cytidine
  modified_base 92: mod_base = OTHER; note = 2'-O-Methyl-guanosine
  modified_base 93: mod_base = OTHER; note = 2'-O-Methyl-guanosine
  modified_base 94: mod_base = OTHER; note = 2'-O-Methyl-uridine
  modified_base 95: mod_base = OTHER; note = 2'-O-Methyl-guanosine
  modified_base 96: mod_base = OTHER; note = 2'-O-Methyl-cytidine
  modified_base 97: mod_base = OTHER; note = 2'-O-Methyl-uridine
  modified_base 98: mod_base = OTHER; note = 2'-O-Methyl-uridine phosphorothioate
  modified_base 99: mod_base = OTHER; note = 2'-O-Methyl-uridine phosphorothioate
  modified_base 100: mod_base = OTHER; note = 2'-O-Methyl-uridine
  misc_difference 101: note = a, c, g, inosine, u, deoxyadenosine, deoxyguanosine, deoxycytidine, deoxyinosine, thymine, ribonebularine, 2'-O-methylnebularine, or 2'-deoxynebularine
  misc_difference 102: note = a, c, g, inosine, u, deoxyadenosine, deoxyguanosine, deoxycytidine, deoxyinosine, thymine, ribonebularine, 2'-O-methylnebularine, or 2'-deoxynebularine
  misc_difference 103: note = a, c, g, inosine, u, deoxyadenosine, deoxyguanosine, deoxycytidine, deoxyinosine, thymine, ribonebularine, 2'-O-methylnebularine, or 2'-deoxynebularine

SEQ ID NO: 3033 - RNA, 103 nt, synthetic construct; identical to SEQ ID NO: 1797
  source 1..103: mol_type = other RNA
  modified_base 1: mod_base = OTHER; note = 2'-O-Methyl-cytidine phosphorothioate
  modified_base 2: mod_base = OTHER; note = 2'-O-Methyl-adenosine phosphorothioate
  modified_base 3: mod_base = OTHER; note = 2'-O-Methyl-guanosine
  modified_base 21: mod_base = OTHER; note = 2'-O-Methyl-guanosine
  modified_base 28: mod_base = OTHER; note = 2'-O-Methyl-adenosine
  modified_base 29: mod_base = OTHER; note = 2'-O-Methyl-guanosine
  modified_base 30: mod_base = OTHER; note = 2'-O-Methyl-cytidine
  modified_base 31: mod_base = OTHER; note = 2'-O-Methyl-uridine
  modified_base 32: mod_base = OTHER; note = 2'-O-Methyl-adenosine
  modified_base 34: mod_base = OTHER; note = 2'-O-Methyl-adenosine
  modified_base 35: mod_base = OTHER; note = 2'-O-Methyl-adenosine
  modified_base 36: mod_base = OTHER; note = 2'-O-Methyl-adenosine
  modified_base 37: mod_base = OTHER; note = 2'-O-Methyl-uridine
  modified_base 38: mod_base = OTHER; note = 2'-O-Methyl-adenosine
  modified_base 39: mod_base = OTHER; note = 2'-O-Methyl-guanosine
  modified_base 40: mod_base = OTHER; note = 2'-O-Methyl-cytidine
  modified_base 41: mod_base = OTHER; note = 2'-O-Methyl-adenosine
  modified_base 42: mod_base = OTHER; note = 2'-O-Methyl-adenosine
  modified_base 46: mod_base = OTHER; note = 2'-O-Methyl-adenosine
  modified_base 48: mod_base = OTHER; note = 2'-O-Methyl-adenosine
  modified_base 50: mod_base = OTHER; note = 2'-O-Methyl-uridine
  modified_base 52: mod_base = OTHER; note = 2'-O-Methyl-adenosine
  modified_base 53: mod_base = OTHER; note = 2'-O-Methyl-guanosine
  modified_base 54: mod_base = OTHER; note = 2'-O-Methyl-guanosine
  modified_base 55: mod_base = OTHER; note = 2'-O-Methyl-cytidine
  modified_base 56: mod_base = OTHER; note = 2'-O-Methyl-uridine
  modified_base 57: mod_base = OTHER; note = 2'-O-Methyl-adenosine
  modified_base 60: mod_base = OTHER; note = 2'-O-Methyl-cytidine
  modified_base 61: mod_base = OTHER; note = 2'-O-Methyl-cytidine
  modified_base 66: mod_base = OTHER; note = 2'-O-Methyl-uridine
  modified_base 67: mod_base = OTHER; note = 2'-O-Methyl-cytidine
  modified_base 70: mod_base = OTHER; note = 2'-O-Methyl-cytidine
  modified_base 71: mod_base = OTHER; note = 2'-O-Methyl-uridine
  modified_base 72: mod_base = OTHER; note = 2'-O-Methyl-uridine
  modified_base 74: mod_base = OTHER; note = 2'-O-Methyl-adenosine
  modified_base 75: mod_base = OTHER; note = 2'-O-Methyl-adenosine
  modified_base 76: mod_base = OTHER; note = 2'-O-Methyl-adenosine
  modified_base 77: mod_base = OTHER; note = 2'-O-Methyl-adenosine
  modified_base 78: mod_base = OTHER; note = 2'-O-Methyl-adenosine
  modified_base 79: mod_base = OTHER; note = 2'-O-Methyl-guanosine
  modified_base 80: mod_base = OTHER; note = 2'-O-Methyl-uridine
  modified_base 82: mod_base = OTHER; note = 2'-O-Methyl-guanosine
  modified_base 83: mod_base = OTHER; note = 2'-O-Methyl-cytidine
  modified_base 84: mod_base = OTHER; note = 2'-O-Methyl-adenosine
  modified_base 85: mod_base = OTHER; note = 2'-O-Methyl-cytidine
  modified_base 86: mod_base = OTHER; note = 2'-O-Methyl-cytidine
  modified_base 87: mod_base = OTHER; note = 2'-O-Methyl-guanosine
  modified_base 89: mod_base = OTHER; note = 2'-O-Methyl-guanosine
  modified_base 92: mod_base = OTHER; note = 2'-O-Methyl-guanosine
  modified_base 93: mod_base = OTHER; note = 2'-O-Methyl-guanosine
  modified_base 94: mod_base = OTHER; note = 2'-O-Methyl-uridine
  modified_base 95: mod_base = OTHER; note = 2'-O-Methyl-guanosine
  modified_base 96: mod_base = OTHER; note = 2'-O-Methyl-cytidine
  modified_base 97: mod_base = OTHER; note = 2'-O-Methyl-uridine
  modified_base 98: mod_base = OTHER; note = 2'-O-Methyl-uridine phosphorothioate
  modified_base 99: mod_base = OTHER; note = 2'-O-Methyl-uridine phosphorothioate
  modified_base 100: mod_base = OTHER; note = 2'-O-Methyl-uridine
  misc_difference 101: note = a, c, g, inosine, u, deoxyadenosine, deoxyguanosine, deoxycytidine, deoxyinosine, thymine, ribonebularine, 2'-O-methylnebularine, or 2'-deoxynebularine
  misc_difference 102: note = a, c, g, inosine, u, deoxyadenosine, deoxyguanosine, deoxycytidine, deoxyinosine, thymine, ribonebularine, 2'-O-methylnebularine, or 2'-deoxynebularine
  misc_difference 103: note = a, c, g, inosine, u, deoxyadenosine, deoxyguanosine, deoxycytidine, deoxyinosine, thymine, ribonebularine, 2'-O-methylnebularine, or 2'-deoxynebularine

SEQ ID NO: 3034 - RNA, 103 nt, synthetic construct; identical to SEQ ID NO: 1795
  source 1..103: mol_type = other RNA
  modified_base 1: mod_base = OTHER; note = 2'-O-Methyl-cytidine phosphorothioate
  modified_base 2: mod_base = OTHER; note = 2'-O-Methyl-cytidine phosphorothioate
  modified_base 3: mod_base = OTHER; note = 2'-O-Methyl-cytidine
  modified_base 21: mod_base = OTHER; note = 2'-O-Methyl-guanosine
  modified_base 28: mod_base = OTHER; note = 2'-O-Methyl-adenosine
  modified_base 29: mod_base = OTHER; note = 2'-O-Methyl-guanosine
  modified_base 30: mod_base = OTHER; note = 2'-O-Methyl-cytidine
  modified_base 31: mod_base = OTHER; note = 2'-O-Methyl-uridine
  modified_base 32: mod_base = OTHER; note = 2'-O-Methyl-adenosine
  modified_base 33: mod_base = OTHER; note = 2'-O-Methyl-guanosine
  modified_base 34: mod_base = OTHER; note = 2'-O-Methyl-adenosine
  modified_base 35: mod_base = OTHER; note = 2'-O-Methyl-adenosine
  modified_base 36: mod_base = OTHER; note = 2'-O-Methyl-adenosine
  modified_base 37: mod_base = OTHER; note = 2'-O-Methyl-uridine
  modified_base 38: mod_base = OTHER; note = 2'-O-Methyl-adenosine
  modified_base 39: mod_base = OTHER; note = 2'-O-Methyl-guanosine
  modified_base 40: mod_base = OTHER; note = 2'-O-Methyl-cytidine
  modified_base 41: mod_base = OTHER; note = 2'-O-Methyl-adenosine
  modified_base 42: mod_base = OTHER; note = 2'-O-Methyl-adenosine
  modified_base 46: mod_base = OTHER; note = 2'-O-Methyl-adenosine
  modified_base 48: mod_base = OTHER; note = 2'-O-Methyl-adenosine
  modified_base 50: mod_base = OTHER; note = 2'-O-Methyl-uridine
  modified_base 52: mod_base = OTHER; note = 2'-O-Methyl-adenosine
  modified_base 53: mod_base = OTHER; note = 2'-O-Methyl-guanosine
  modified_base 54: mod_base = OTHER; note = 2'-O-Methyl-guanosine
  modified_base 55: mod_base = OTHER; note = 2'-O-Methyl-cytidine
  modified_base 56: mod_base = OTHER; note = 2'-O-Methyl-uridine
  modified_base 57: mod_base = OTHER; note = 2'-O-Methyl-adenosine
  modified_base 60: mod_base = OTHER; note = 2'-O-Methyl-cytidine
  modified_base 61: mod_base = OTHER; note = 2'-O-Methyl-cytidine
  modified_base 64: mod_base = OTHER; note = uridine phosphorothioate
  modified_base 66: mod_base = OTHER; note = 2'-O-Methyl-uridine
  modified_base 67: mod_base = OTHER; note = 2'-O-Methyl-cytidine
  modified_base 70: mod_base = OTHER; note = 2'-O-Methyl-cytidine
  modified_base 71: mod_base = OTHER; note = 2'-O-Methyl-uridine
  modified_base 72: mod_base = OTHER; note = 2'-O-Methyl-uridine
  modified_base 73: mod_base = OTHER; note = 2'-O-Methyl-guanosine
  modified_base 74: mod_base = OTHER; note = 2'-O-Methyl-adenosine
  modified_base 75: mod_base = OTHER; note = 2'-O-Methyl-adenosine
  modified_base 76: mod_base = OTHER; note = 2'-O-Methyl-adenosine
  modified_base 77: mod_base = OTHER; note = 2'-O-Methyl-adenosine
  modified_base 78: mod_base = OTHER; note = 2'-O-Methyl-adenosine
  modified_base 79: mod_base = OTHER; note = 2'-O-Methyl-guanosine
  modified_base 80: mod_base = OTHER; note = 2'-O-Methyl-uridine
  modified_base 81: mod_base = OTHER; note = 2'-O-Methyl-guanosine
  modified_base 83: mod_base = OTHER; note = 2'-O-Methyl-cytidine
  modified_base 84: mod_base = OTHER; note = 2'-O-Methyl-adenosine
  modified_base 85: mod_base = OTHER; note = 2'-O-Methyl-cytidine
  modified_base 86: mod_base = OTHER; note = 2'-O-Methyl-cytidine
  modified_base 87: mod_base = OTHER; note = 2'-O-Methyl-guanosine
  modified_base 88: mod_base = OTHER; note = 2'-O-Methyl-adenosine
  modified_base 89: mod_base = OTHER; note = 2'-O-Methyl-guanosine
  modified_base 90: mod_base = OTHER; note = 2'-O-Methyl-uridine
  modified_base 91: mod_base = OTHER; note = 2'-O-Methyl-cytidine
  modified_base 92: mod_base = OTHER; note = 2'-O-Methyl-guanosine
  modified_base 93: mod_base = OTHER; note = 2'-O-Methyl-guanosine
  modified_base 94: mod_base = OTHER; note = 2'-O-Methyl-uridine
  modified_base 95: mod_base = OTHER; note = 2'-O-Methyl-guanosine
  modified_base 96: mod_base = OTHER; note = 2'-O-Methyl-cytidine
  modified_base 97: mod_base = OTHER; note = 2'-O-Methyl-uridine
  modified_base 98: mod_base = OTHER; note = 2'-O-Methyl-uridine phosphorothioate
  modified_base 99: mod_base = OTHER; note = 2'-O-Methyl-uridine phosphorothioate
  modified_base 100: mod_base = OTHER; note = 2'-O-Methyl-uridine
  misc_difference 101: note = a, c, g, inosine, u, deoxyadenosine, deoxyguanosine, deoxycytidine, deoxyinosine, thymine, ribonebularine, 2'-O-methylnebularine, or 2'-deoxynebularine
  misc_difference 102: note = a, c, g, inosine, u, deoxyadenosine, deoxyguanosine, deoxycytidine, deoxyinosine, thymine, ribonebularine, 2'-O-methylnebularine, or 2'-deoxynebularine
  misc_difference 103: note = a, c, g, inosine, u, deoxyadenosine, deoxyguanosine, deoxycytidine, deoxyinosine, thymine, ribonebularine, 2'-O-methylnebularine, or 2'-deoxynebularine

SEQ ID NO: 3035 - RNA, 103 nt, synthetic construct; identical to SEQ ID NO: 1795
  source 1..103: mol_type = other RNA
  modified_base 1: mod_base = OTHER; note = 2'-O-Methyl-cytidine phosphorothioate
  modified_base 2: mod_base = OTHER; note = 2'-O-Methyl-cytidine phosphorothioate
  modified_base 3: mod_base = OTHER; note = 2'-O-Methyl-cytidine
  modified_base 21: mod_base = OTHER; note = 2'-O-Methyl-guanosine
  modified_base 28: mod_base = OTHER; note = 2'-O-Methyl-adenosine
  modified_base 29: mod_base = OTHER; note = 2'-O-Methyl-guanosine
  modified_base 30: mod_base = OTHER; note = 2'-O-Methyl-cytidine
  modified_base 31: mod_base = OTHER; note = 2'-O-Methyl-uridine
  modified_base 32: mod_base = OTHER; note = 2'-O-Methyl-adenosine
  modified_base 34: mod_base = OTHER; note = 2'-O-Methyl-adenosine
  modified_base 35: mod_base = OTHER; note = 2'-O-Methyl-adenosine
  modified_base 36: mod_base = OTHER; note = 2'-O-Methyl-adenosine
  modified_base 37: mod_base = OTHER; note = 2'-O-Methyl-uridine
  modified_base 38: mod_base = OTHER; note = 2'-O-Methyl-adenosine
  modified_base 39: mod_base = OTHER; note = 2'-O-Methyl-guanosine
  modified_base 40: mod_base = OTHER; note = 2'-O-Methyl-cytidine
  modified_base 41: mod_base = OTHER; note = 2'-O-Methyl-adenosine
  modified_base 42: mod_base = OTHER; note = 2'-O-Methyl-adenosine
  modified_base 46: mod_base = OTHER; note = 2'-O-Methyl-adenosine
  modified_base 48: mod_base = OTHER; note = 2'-O-Methyl-adenosine
  modified_base 50: mod_base = OTHER; note = 2'-O-Methyl-uridine
  modified_base 52: mod_base = OTHER; note = 2'-O-Methyl-adenosine
  modified_base 53: mod_base = OTHER; note = 2'-O-Methyl-guanosine
  modified_base 54: mod_base = OTHER; note = 2'-O-Methyl-guanosine
  modified_base 55: mod_base = OTHER; note = 2'-O-Methyl-cytidine
  modified_base 56: mod_base = OTHER; note = 2'-O-Methyl-uridine
  modified_base 57: mod_base = OTHER; note = 2'-O-Methyl-adenosine
  modified_base 60: mod_base = OTHER; note = 2'-O-Methyl-cytidine
  modified_base 61: mod_base = OTHER; note = 2'-O-Methyl-cytidine
  modified_base 64: mod_base = OTHER; note = uridine phosphorothioate
  modified_base 66: mod_base = OTHER; note = 2'-O-Methyl-uridine
  modified_base 67: mod_base = OTHER; note = 2'-O-Methyl-cytidine
  modified_base 70: mod_base = OTHER; note = 2'-O-Methyl-cytidine
  modified_base 71: mod_base = OTHER; note = 2'-O-Methyl-uridine
  modified_base 72: mod_base = OTHER; note = 2'-O-Methyl-uridine
  modified_base 74: mod_base = OTHER; note = 2'-O-Methyl-adenosine
  modified_base 75: mod_base = OTHER; note = 2'-O-Methyl-adenosine
  modified_base 76: mod_base = OTHER; note = 2'-O-Methyl-adenosine
  modified_base 77: mod_base = OTHER; note = 2'-O-Methyl-adenosine
  modified_base 78: mod_base = OTHER; note = 2'-O-Methyl-adenosine
  modified_base 79: mod_base = OTHER; note = 2'-O-Methyl-guanosine
  modified_base 80: mod_base = OTHER; note = 2'-O-Methyl-uridine
  modified_base 81: mod_base = OTHER; note = 2'-O-Methyl-guanosine
  modified_base 83: mod_base = OTHER; note = 2'-O-Methyl-cytidine
  modified_base 84: mod_base = OTHER; note = 2'-O-Methyl-adenosine
  modified_base 85: mod_base = OTHER; note = 2'-O-Methyl-cytidine
  modified_base 86: mod_base = OTHER; note = 2'-O-Methyl-cytidine
  modified_base 87: mod_base = OTHER; note = 2'-O-Methyl-guanosine
  modified_base 88: mod_base = OTHER; note = 2'-O-Methyl-adenosine
  modified_base 89: mod_base = OTHER; note = 2'-O-Methyl-guanosine
  modified_base 90: mod_base = OTHER; note = 2'-O-Methyl-uridine
  modified_base 91: mod_base = OTHER; note = 2'-O-Methyl-cytidine
  modified_base 92: mod_base = OTHER; note = 2'-O-Methyl-guanosine
  modified_base 93: mod_base = OTHER; note = 2'-O-Methyl-guanosine
  modified_base 94: mod_base = OTHER; note = 2'-O-Methyl-uridine
  modified_base 95: mod_base = OTHER; note = 2'-O-Methyl-guanosine
  modified_base 96: mod_base = OTHER; note = 2'-O-Methyl-cytidine
  modified_base 97: mod_base = OTHER; note = 2'-O-Methyl-uridine
  modified_base 98: mod_base = OTHER; note = 2'-O-Methyl-uridine phosphorothioate
  modified_base 99: mod_base = OTHER; note = 2'-O-Methyl-uridine phosphorothioate
  modified_base 100: mod_base = OTHER; note = 2'-O-Methyl-uridine
  misc_difference 101: note = a, c, g, inosine, u, deoxyadenosine, deoxyguanosine, deoxycytidine, deoxyinosine, thymine, ribonebularine, 2'-O-methylnebularine, or 2'-deoxynebularine
  misc_difference 102: note = a, c, g, inosine, u, deoxyadenosine, deoxyguanosine, deoxycytidine, deoxyinosine, thymine, ribonebularine, 2'-O-methylnebularine, or 2'-deoxynebularine
  misc_difference 103: note = a, c, g, inosine, u, deoxyadenosine, deoxyguanosine, deoxycytidine, deoxyinosine, thymine, ribonebularine, 2'-O-methylnebularine, or 2'-deoxynebularine

SEQ ID NO: 3036 - RNA, 103 nt, synthetic construct; identical to SEQ ID NO: 1796
  source 1..103: mol_type = other RNA
  modified_base 1: mod_base = OTHER; note = 2'-O-Methyl-guanosine phosphorothioate
  modified_base 2: mod_base = OTHER; note = 2'-O-Methyl-adenosine phosphorothioate
  modified_base 3: mod_base = OTHER; note = 2'-O-Methyl-guanosine
  modified_base 21: mod_base = OTHER; note = 2'-O-Methyl-guanosine
  modified_base 28: mod_base = OTHER; note = 2'-O-Methyl-adenosine
  modified_base 29: mod_base = OTHER; note = 2'-O-Methyl-guanosine
  modified_base 30: mod_base = OTHER; note = 2'-O-Methyl-cytidine
  modified_base 31: mod_base = OTHER; note = 2'-O-Methyl-uridine
  modified_base 32: mod_base = OTHER; note = 2'-O-Methyl-adenosine
  modified_base 33: mod_base = OTHER; note = 2'-O-Methyl-guanosine
  modified_base 34: mod_base = OTHER; note = 2'-O-Methyl-adenosine
  modified_base 35: mod_base = OTHER; note = 2'-O-Methyl-adenosine
  modified_base 36: mod_base = OTHER; note = 2'-O-Methyl-adenosine
  modified_base 37: mod_base = OTHER; note = 2'-O-Methyl-uridine
  modified_base 38: mod_base = OTHER; note = 2'-O-Methyl-adenosine
  modified_base 39: mod_base = OTHER; note = 2'-O-Methyl-guanosine
  modified_base 40: mod_base = OTHER; note = 2'-O-Methyl-cytidine
  modified_base 41: mod_base = OTHER; note = 2'-O-Methyl-adenosine
  modified_base 42: mod_base = OTHER; note = 2'-O-Methyl-adenosine
  modified_base 46: mod_base = OTHER; note = 2'-O-Methyl-adenosine
  modified_base 48: mod_base = OTHER; note = 2'-O-Methyl-adenosine
  modified_base 50: mod_base = OTHER; note = 2'-O-Methyl-uridine
  modified_base 52: mod_base = OTHER; note = 2'-O-Methyl-adenosine
  modified_base 53: mod_base = OTHER; note = 2'-O-Methyl-guanosine
  modified_base 54: mod_base = OTHER; note = 2'-O-Methyl-guanosine
  modified_base 55: mod_base = OTHER; note = 2'-O-Methyl-cytidine
  modified_base 56: mod_base = OTHER; note = 2'-O-Methyl-uridine
  modified_base 57: mod_base = OTHER; note = 2'-O-Methyl-adenosine
  modified_base 60: mod_base = OTHER; note = 2'-O-Methyl-cytidine
  modified_base 61: mod_base = OTHER; note = 2'-O-Methyl-cytidine
  modified_base 64: mod_base = OTHER; note = uridine phosphorothioate
  modified_base 66: mod_base = OTHER; note = 2'-O-Methyl-uridine
  modified_base 67: mod_base = OTHER; note = 2'-O-Methyl-cytidine
  modified_base 70: mod_base = OTHER; note = 2'-O-Methyl-cytidine
  modified_base 71: mod_base = OTHER; note = 2'-O-Methyl-uridine
  modified_base 72: mod_base = OTHER; note = 2'-O-Methyl-uridine
  modified_base 73: mod_base = OTHER; note = 2'-O-Methyl-guanosine
  modified_base 74: mod_base = OTHER; note = 2'-O-Methyl-adenosine
  modified_base 75: mod_base = OTHER; note = 2'-O-Methyl-adenosine
  modified_base 76: mod_base = OTHER; note = 2'-O-Methyl-adenosine
  modified_base 77: mod_base = OTHER; note = 2'-O-Methyl-adenosine
  modified_base 78: mod_base = OTHER; note = 2'-O-Methyl-adenosine
  modified_base 79: mod_base = OTHER; note = 2'-O-Methyl-guanosine
  modified_base 80: mod_base = OTHER; note = 2'-O-Methyl-uridine
  modified_base 81: mod_base = OTHER; note = 2'-O-Methyl-guanosine
  modified_base 83: mod_base = OTHER; note = 2'-O-Methyl-cytidine
  modified_base 84: mod_base = OTHER; note = 2'-O-Methyl-adenosine
  modified_base 85: mod_base = OTHER; note = 2'-O-Methyl-cytidine
  modified_base 86: mod_base = OTHER; note = 2'-O-Methyl-cytidine
  modified_base 87: mod_base = OTHER; note = 2'-O-Methyl-guanosine
  modified_base 88: mod_base = OTHER; note = 2'-O-Methyl-adenosine
  modified_base 89: mod_base = OTHER; note = 2'-O-Methyl-guanosine
  modified_base 90: mod_base = OTHER; note = 2'-O-Methyl-uridine
  modified_base 91: mod_base = OTHER; note = 2'-O-Methyl-cytidine
  modified_base 92: mod_base = OTHER; note = 2'-O-Methyl-guanosine
  modified_base 93: mod_base = OTHER; note = 2'-O-Methyl-guanosine
  modified_base 94: mod_base = OTHER; note = 2'-O-Methyl-uridine
  modified_base 95: mod_base = OTHER; note = 2'-O-Methyl-guanosine
  modified_base 96: mod_base = OTHER; note = 2'-O-Methyl-cytidine
  modified_base 97: mod_base = OTHER; note = 2'-O-Methyl-uridine
  modified_base 98: mod_base = OTHER; note = 2'-O-Methyl-uridine phosphorothioate
  modified_base 99: mod_base = OTHER; note = 2'-O-Methyl-uridine phosphorothioate
  modified_base 100: mod_base = OTHER; note = 2'-O-Methyl-uridine
  misc_difference 101: note = a, c, g, inosine, u, deoxyadenosine, deoxyguanosine, deoxycytidine, deoxyinosine, thymine, ribonebularine, 2'-O-methylnebularine, or 2'-deoxynebularine
  misc_difference 102: note = a, c, g, inosine, u, deoxyadenosine, deoxyguanosine, deoxycytidine, deoxyinosine, thymine, ribonebularine, 2'-O-methylnebularine, or 2'-deoxynebularine
  misc_difference 103: note = a, c, g, inosine, u, deoxyadenosine, deoxyguanosine, deoxycytidine, deoxyinosine, thymine, ribonebularine, 2'-O-methylnebularine, or 2'-deoxynebularine

SEQ ID NO: 3037 - RNA, 103 nt, synthetic construct; identical to SEQ ID NO: 1796
  source 1..103: mol_type = other RNA
  modified_base 1: mod_base = OTHER; note = 2'-O-Methyl-guanosine phosphorothioate
  modified_base 2: mod_base = OTHER; note = 2'-O-Methyl-adenosine phosphorothioate
  modified_base 3: mod_base = OTHER; note = 2'-O-Methyl-guanosine
  modified_base 21: mod_base = OTHER; note = 2'-O-Methyl-guanosine
  modified_base 28: mod_base = OTHER; note = 2'-O-Methyl-adenosine
  modified_base 29: mod_base = OTHER; note = 2'-O-Methyl-guanosine
  modified_base 30: mod_base = OTHER; note = 2'-O-Methyl-cytidine
  modified_base 31: mod_base = OTHER; note = 2'-O-Methyl-uridine
  modified_base 32: mod_base = OTHER; note = 2'-O-Methyl-adenosine
  modified_base 34: mod_base = OTHER; note = 2'-O-Methyl-adenosine
  modified_base 35: mod_base = OTHER; note = 2'-O-Methyl-adenosine
  modified_base 36: mod_base = OTHER; note = 2'-O-Methyl-adenosine
  modified_base 37: mod_base = OTHER; note = 2'-O-Methyl-uridine
  modified_base 38: mod_base = OTHER; note = 2'-O-Methyl-adenosine
  modified_base 39: mod_base = OTHER; note = 2'-O-Methyl-guanosine
  modified_base 40: mod_base = OTHER; note = 2'-O-Methyl-cytidine
  modified_base 41: mod_base = OTHER; note = 2'-O-Methyl-adenosine
  modified_base 42: mod_base = OTHER; note = 2'-O-Methyl-adenosine
  modified_base 46: mod_base = OTHER; note = 2'-O-Methyl-adenosine
  modified_base 48: mod_base = OTHER; note = 2'-O-Methyl-adenosine
  modified_base 50: mod_base = OTHER; note = 2'-O-Methyl-uridine
  modified_base 52: mod_base = OTHER; note = 2'-O-Methyl-adenosine
  modified_base 53: mod_base = OTHER; note = 2'-O-Methyl-guanosine
  modified_base 54: mod_base = OTHER; note = 2'-O-Methyl-guanosine
  modified_base 55: mod_base = OTHER; note = 2'-O-Methyl-cytidine
  modified_base 56: mod_base = OTHER; note = 2'-O-Methyl-uridine
  modified_base 57: mod_base = OTHER; note = 2'-O-Methyl-adenosine
  modified_base 60: mod_base = OTHER; note = 2'-O-Methyl-cytidine
  modified_base 61: mod_base = OTHER; note = 2'-O-Methyl-cytidine
  modified_base 64: mod_base = OTHER; note = uridine phosphorothioate
  modified_base 66: mod_base = OTHER; note = 2'-O-Methyl-uridine
  modified_base 67: mod_base = OTHER; note = 2'-O-Methyl-cytidine
  modified_base 70: mod_base = OTHER; note = 2'-O-Methyl-cytidine
  modified_base 71: mod_base = OTHER; note = 2'-O-Methyl-uridine
  modified_base 72: mod_base = OTHER; note = 2'-O-Methyl-uridine
  modified_base 74: mod_base = OTHER; note = 2'-O-Methyl-adenosine
  modified_base 75: mod_base = OTHER; note = 2'-O-Methyl-adenosine
  modified_base 76: mod_base = OTHER; note = 2'-O-Methyl-adenosine
  modified_base 77: mod_base = OTHER; note = 2'-O-Methyl-adenosine
  modified_base 78: mod_base = OTHER; note = 2'-O-Methyl-adenosine
  modified_base 79: mod_base = OTHER; note = 2'-O-Methyl-guanosine
  modified_base 80: mod_base = OTHER; note = 2'-O-Methyl-uridine
  modified_base 81: mod_base = OTHER; note = 2'-O-Methyl-guanosine
  modified_base 83: mod_base = OTHER; note = 2'-O-Methyl-cytidine
  modified_base 84: mod_base = OTHER; note = 2'-O-Methyl-adenosine
  modified_base 85: mod_base = OTHER; note = 2'-O-Methyl-cytidine
  modified_base 86: mod_base = OTHER; note = 2'-O-Methyl-cytidine
  modified_base 87: mod_base = OTHER; note = 2'-O-Methyl-guanosine
  modified_base 88: mod_base = OTHER; note = 2'-O-Methyl-adenosine
  modified_base 89: mod_base = OTHER; note = 2'-O-Methyl-guanosine
  modified_base 90: mod_base = OTHER; note = 2'-O-Methyl-uridine
  modified_base 91: mod_base = OTHER; note = 2'-O-Methyl-cytidine
  modified_base 92: mod_base = OTHER; note = 2'-O-Methyl-guanosine
  modified_base 93: mod_base = OTHER; note = 2'-O-Methyl-guanosine
  modified_base 94: mod_base = OTHER; note = 2'-O-Methyl-uridine
  modified_base 95: mod_base = OTHER; note = 2'-O-Methyl-guanosine
  modified_base 96: mod_base = OTHER; note = 2'-O-Methyl-cytidine
  modified_base 97: mod_base = OTHER; note = 2'-O-Methyl-uridine
  modified_base 98: mod_base = OTHER; note = 2'-O-Methyl-uridine phosphorothioate
  modified_base 99: mod_base = OTHER; note = 2'-O-Methyl-uridine phosphorothioate
  modified_base 100: mod_base = OTHER; note = 2'-O-Methyl-uridine
  misc_difference 101: note = a, c, g, inosine, u, deoxyadenosine, deoxyguanosine, deoxycytidine, deoxyinosine, thymine, ribonebularine, 2'-O-methylnebularine, or 2'-deoxynebularine
  misc_difference 102: note = a, c, g, inosine, u, deoxyadenosine, deoxyguanosine, deoxycytidine, deoxyinosine, thymine, ribonebularine, 2'-O-methylnebularine, or 2'-deoxynebularine
  misc_difference 103: note = a, c, g, inosine, u, deoxyadenosine, deoxyguanosine, deoxycytidine, deoxyinosine, thymine, ribonebularine, 2'-O-methylnebularine, or 2'-deoxynebularine

SEQ ID NO: 3038 - RNA, 103 nt, synthetic construct; identical to SEQ ID NO: 1797
  source 1..103: mol_type = other RNA
  modified_base 1: mod_base = OTHER; note = 2'-O-Methyl-cytidine phosphorothioate
  modified_base 2: mod_base = OTHER; note = 2'-O-Methyl-adenosine phosphorothioate
  modified_base 3: mod_base = OTHER; note = 2'-O-Methyl-guanosine
  modified_base 21: mod_base = OTHER; note = 2'-O-Methyl-guanosine
  modified_base 28: mod_base = OTHER; note = 2'-O-Methyl-adenosine
  modified_base 29: mod_base = OTHER; note = 2'-O-Methyl-guanosine
  modified_base 30: mod_base = OTHER; note = 2'-O-Methyl-cytidine
  modified_base 31: mod_base = OTHER; note = 2'-O-Methyl-uridine
  modified_base 32: mod_base = OTHER; note = 2'-O-Methyl-adenosine
  modified_base 33: mod_base = OTHER; note = 2'-O-Methyl-guanosine
  modified_base 34: mod_base = OTHER; note = 2'-O-Methyl-adenosine
  modified_base 35: mod_base = OTHER; note = 2'-O-Methyl-adenosine
  modified_base 36: mod_base = OTHER; note = 2'-O-Methyl-adenosine
  modified_base 37: mod_base = OTHER; note = 2'-O-Methyl-uridine
  modified_base 38: mod_base = OTHER; note = 2'-O-Methyl-adenosine
  modified_base 39: mod_base = OTHER; note = 2'-O-Methyl-guanosine
  modified_base 40: mod_base = OTHER; note = 2'-O-Methyl-cytidine
  modified_base 41: mod_base = OTHER; note = 2'-O-Methyl-adenosine
  modified_base 42: mod_base = OTHER; note = 2'-O-Methyl-adenosine
  modified_base 46: mod_base = OTHER; note = 2'-O-Methyl-adenosine
  modified_base 48: mod_base = OTHER; note = 2'-O-Methyl-adenosine
  modified_base 50: mod_base = OTHER; note = 2'-O-Methyl-uridine
  modified_base 52: mod_base = OTHER; note = 2'-O-Methyl-adenosine
  modified_base 53: mod_base = OTHER; note = 2'-O-Methyl-guanosine
  modified_base 54: mod_base = OTHER; note = 2'-O-Methyl-guanosine
  modified_base 57: mod_base = OTHER; note = 2'-O-Methyl-adenosine
  modified_base 61: mod_base = OTHER; note = 2'-O-Methyl-cytidine
  modified_base 64: mod_base = OTHER; note = uridine phosphorothioate
  modified_base 66: mod_base = OTHER; note = 2'-O-Methyl-uridine
  modified_base 67: mod_base = OTHER; note = 2'-O-Methyl-cytidine
  modified_base 70: mod_base = OTHER; note = 2'-O-Methyl-cytidine
  modified_base 71: mod_base = OTHER; note = 2'-O-Methyl-uridine
  modified_base 72: mod_base = OTHER; note = 2'-O-Methyl-uridine
  modified_base 74: mod_base = OTHER; note = 2'-O-Methyl-adenosine
  modified_base 75: mod_base = OTHER; note = 2'-O-Methyl-adenosine
  modified_base 76: mod_base = OTHER; note = 2'-O-Methyl-adenosine
  modified_base 77: mod_base = OTHER; note = 2'-O-Methyl-adenosine
  modified_base 78: mod_base = OTHER; note = 2'-O-Methyl-adenosine
  modified_base 79: mod_base = OTHER; note = 2'-O-Methyl-guanosine
  modified_base 80: mod_base = OTHER; note = 2'-O-Methyl-uridine
  modified_base 82: mod_base = OTHER; note = 2'-O-Methyl-guanosine
  modified_base 83: mod_base = OTHER; note = 2'-O-Methyl-cytidine
  modified_base 84: mod_base = OTHER; note = 2'-O-Methyl-adenosine
  modified_base 85: mod_base = OTHER; note = 2'-O-Methyl-cytidine
  modified_base 86: mod_base = OTHER; note = 2'-O-Methyl-cytidine
  modified_base 87: mod_base = OTHER; note = 2'-O-Methyl-guanosine
  modified_base 89: mod_base = OTHER; note = 2'-O-Methyl-guanosine
  modified_base 92: mod_base = OTHER; note = 2'-O-Methyl-guanosine
  modified_base 93: mod_base = OTHER; note = 2'-O-Methyl-guanosine
  modified_base 94: mod_base = OTHER; note = 2'-O-Methyl-uridine
  modified_base 95: mod_base = OTHER; note = 2'-O-Methyl-guanosine
  modified_base 96: mod_base = OTHER; note = 2'-O-Methyl-cytidine
  modified_base 97: mod_base = OTHER; note = 2'-O-Methyl-uridine
  modified_base 98: mod_base = OTHER; note = 2'-O-Methyl-uridine phosphorothioate
  modified_base 99: mod_base = OTHER; note = 2'-O-Methyl-uridine phosphorothioate
  modified_base 100: mod_base = OTHER; note = 2'-O-Methyl-uridine
  misc_difference 101: note = a, c, g, inosine, u, deoxyadenosine, deoxyguanosine, deoxycytidine, deoxyinosine, thymine, ribonebularine, 2'-O-methylnebularine, or 2'-deoxynebularine
  misc_difference 102: note = a, c, g, inosine, u, deoxyadenosine, deoxyguanosine, deoxycytidine, deoxyinosine, thymine, ribonebularine, 2'-O-methylnebularine, or 2'-deoxynebularine
  misc_difference 103: note = a, c, g, inosine, u, deoxyadenosine, deoxyguanosine, deoxycytidine, deoxyinosine, thymine, ribonebularine, 2'-O-methylnebularine, or 2'-deoxynebularine

SEQ ID NO: 3039 - RNA, 103 nt, synthetic construct; identical to SEQ ID NO: 1797
  source 1..103: mol_type = other RNA
  modified_base 1: mod_base = OTHER; note = 2'-O-Methyl-cytidine phosphorothioate
  modified_base 2: mod_base = OTHER; note = 2'-O-Methyl-adenosine phosphorothioate
  modified_base 3: mod_base = OTHER; note = 2'-O-Methyl-guanosine
  modified_base 21: mod_base = OTHER; note = 2'-O-Methyl-guanosine
  modified_base 28: mod_base = OTHER; note = 2'-O-Methyl-adenosine
  modified_base 29: mod_base = OTHER; note = 2'-O-Methyl-guanosine
  modified_base 30: mod_base = OTHER; note = 2'-O-Methyl-cytidine
  modified_base 31: mod_base = OTHER; note = 2'-O-Methyl-uridine
  modified_base 32: mod_base = OTHER; note = 2'-O-Methyl-adenosine
  modified_base 33: mod_base = OTHER; note = 2'-O-Methyl-guanosine
  modified_base 34: mod_base = OTHER; note = 2'-O-Methyl-adenosine
  modified_base 35: mod_base = OTHER; note = 2'-O-Methyl-adenosine
  modified_base 36: mod_base = OTHER; note = 2'-O-Methyl-adenosine
  modified_base 37: mod_base = OTHER; note = 2'-O-Methyl-uridine
  modified_base 38: mod_base = OTHER; note = 2'-O-Methyl-adenosine
  modified_base 39: mod_base = OTHER; note = 2'-O-Methyl-guanosine
  modified_base 40: mod_base = OTHER; note = 2'-O-Methyl-cytidine
  modified_base 41: mod_base = OTHER; note = 2'-O-Methyl-adenosine
  modified_base 42: mod_base = OTHER; note = 2'-O-Methyl-adenosine
  modified_base 46: mod_base = OTHER; note = 2'-O-Methyl-adenosine
  modified_base 48: mod_base = OTHER; note = 2'-O-Methyl-adenosine
  modified_base 50: mod_base = OTHER; note = 2'-O-Methyl-uridine
  modified_base 52: mod_base = OTHER; note = 2'-O-Methyl-adenosine
  modified_base 53: mod_base = OTHER; note = 2'-O-Methyl-guanosine
  modified_base 54: mod_base = OTHER; note = 2'-O-Methyl-guanosine
  modified_base 55: mod_base = OTHER; note = 2'-O-Methyl-cytidine
  modified_base 56: mod_base = OTHER; note = 2'-O-Methyl-uridine
  modified_base 57: mod_base = OTHER; note = 2'-O-Methyl-adenosine
  modified_base 60: mod_base = OTHER; note = 2'-O-Methyl-cytidine
  modified_base 61: mod_base = OTHER; note = 2'-O-Methyl-cytidine
  modified_base 64: mod_base = OTHER; note = uridine phosphorothioate
  modified_base 66: mod_base = OTHER; note = 2'-O-Methyl-uridine
  modified_base 67: mod_base = OTHER; note = 2'-O-Methyl-cytidine
  modified_base 70: mod_base = OTHER; note = 2'-O-Methyl-cytidine
  modified_base 71: mod_base = OTHER; note = 2'-O-Methyl-uridine
  modified_base 72: mod_base = OTHER; note = 2'-O-Methyl-uridine
  modified_base 74: mod_base = OTHER; note = 2'-O-Methyl-adenosine
  modified_base 75: mod_base = OTHER; note = 2'-O-Methyl-adenosine
  modified_base 76: mod_base = OTHER; note = 2'-O-Methyl-adenosine
  modified_base 77: mod_base = OTHER; note = 2'-O-Methyl-adenosine
  modified_base 78: mod_base = OTHER; note = 2'-O-Methyl-adenosine
  modified_base 79: mod_base = OTHER; note = 2'-O-Methyl-guanosine
  modified_base 80: mod_base = OTHER; note = 2'-O-Methyl-uridine
  modified_base 82: mod_base = OTHER; note = 2'-O-Methyl-guanosine
  modified_base 83: mod_base = OTHER; note = 2'-O-Methyl-cytidine
  modified_base 84: mod_base = OTHER; note = 2'-O-Methyl-adenosine
  modified_base 85: mod_base = OTHER; note = 2'-O-Methyl-cytidine
  modified_base 86: mod_base = OTHER; note = 2'-O-Methyl-cytidine
  modified_base 87: mod_base = OTHER; note = 2'-O-Methyl-guanosine
  modified_base 89: mod_base = OTHER; note = 2'-O-Methyl-guanosine
  modified_base 92: mod_base = OTHER; note = 2'-O-Methyl-guanosine
  modified_base 93: mod_base = OTHER; note = 2'-O-Methyl-guanosine
  modified_base 94: mod_base = OTHER; note = 2'-O-Methyl-uridine
  modified_base 95: mod_base = OTHER; note = 2'-O-Methyl-guanosine
  modified_base 96: mod_base = OTHER; note = 2'-O-Methyl-cytidine
  modified_base 97: mod_base = OTHER; note = 2'-O-Methyl-uridine
  modified_base 98: mod_base = OTHER; note = 2'-O-Methyl-uridine phosphorothioate
  modified_base 99: mod_base = OTHER; note = 2'-O-Methyl-uridine phosphorothioate
  modified_base 100: mod_base = OTHER; note = 2'-O-Methyl-uridine
  misc_difference 101: note = a, c, g, inosine, u, deoxyadenosine, deoxyguanosine, deoxycytidine, deoxyinosine, thymine, ribonebularine, 2'-O-methylnebularine, or 2'-deoxynebularine
  misc_difference 102: note = a, c, g, inosine, u, deoxyadenosine, deoxyguanosine, deoxycytidine, deoxyinosine, thymine, ribonebularine, 2'-O-methylnebularine, or 2'-deoxynebularine
  misc_difference 103: note = a, c, g, inosine, u, deoxyadenosine, deoxyguanosine, deoxycytidine, deoxyinosine, thymine, ribonebularine, 2'-O-methylnebularine, or 2'-deoxynebularine

SEQ ID NO: 3040 - RNA, 103 nt, synthetic construct; identical to SEQ ID NO: 1797
  source 1..103: mol_type = other RNA
  modified_base 1: mod_base = OTHER; note = 2'-O-Methyl-cytidine phosphorothioate
  modified_base 2: mod_base = OTHER; note = 2'-O-Methyl-adenosine phosphorothioate
  modified_base 3: mod_base = OTHER; note = 2'-O-Methyl-guanosine
  modified_base 21: mod_base = OTHER; note = 2'-O-Methyl-guanosine
  modified_base 28: mod_base = OTHER; note = 2'-O-Methyl-adenosine
  modified_base 29: mod_base = OTHER; note = 2'-O-Methyl-guanosine
  modified_base 30: mod_base = OTHER; note = 2'-O-Methyl-cytidine
  modified_base 31: mod_base = OTHER; note = 2'-O-Methyl-uridine
  modified_base 32: mod_base = OTHER; note = 2'-O-Methyl-adenosine
  modified_base 33: mod_base = OTHER; note = 2'-O-Methyl-guanosine
  modified_base 34: mod_base = OTHER; note = 2'-O-Methyl-adenosine
  modified_base 35: mod_base = OTHER; note = 2'-O-Methyl-adenosine
  modified_base 36: mod_base = OTHER; note = 2'-O-Methyl-adenosine
  modified_base 37: mod_base = OTHER; note = 2'-O-Methyl-uridine
  modified_base 38: mod_base = OTHER; note = 2'-O-Methyl-adenosine
  modified_base 39: mod_base = OTHER; note = 2'-O-Methyl-guanosine
  modified_base 40: mod_base = OTHER; note = 2'-O-Methyl-cytidine
  modified_base 41: mod_base = OTHER; note = 2'-O-Methyl-adenosine
  modified_base 42: mod_base = OTHER; note = 2'-O-Methyl-adenosine
  modified_base 46: mod_base = OTHER; note = 2'-O-Methyl-adenosine
  modified_base 48: mod_base = OTHER; note = 2'-O-Methyl-adenosine
  modified_base 50: mod_base = OTHER; note = 2'-O-Methyl-uridine
  modified_base 52: mod_base = OTHER; note = 2'-O-Methyl-adenosine
  modified_base 53: mod_base = OTHER; note = 2'-O-Methyl-guanosine
  modified_base 54: mod_base = OTHER; note = 2'-O-Methyl-guanosine
  modified_base 57: mod_base = OTHER; note = 2'-O-Methyl-adenosine
  modified_base 61: mod_base = OTHER; note = 2'-O-Methyl-cytidine
  modified_base 64: mod_base = OTHER; note = uridine phosphorothioate
  modified_base 66: mod_base = OTHER; note = 2'-O-Methyl-uridine
  modified_base 67: mod_base = OTHER; note = 2'-O-Methyl-cytidine
  modified_base 70: mod_base = OTHER; note = 2'-O-Methyl-cytidine
  modified_base 71: mod_base = OTHER; note = 2'-O-Methyl-uridine
  modified_base 72: mod_base = OTHER; note = 2'-O-Methyl-uridine
  modified_base 73: mod_base = OTHER; note = 2'-O-Methyl-guanosine
  modified_base 74: mod_base = OTHER; note = 2'-O-Methyl-adenosine
  modified_base 75: mod_base = OTHER; note = 2'-O-Methyl-adenosine
  modified_base 76: mod_base = OTHER; note = 2'-O-Methyl-adenosine
  modified_base 77: mod_base = OTHER; note = 2'-O-Methyl-adenosine
  modified_base 78: mod_base = OTHER; note = 2'-O-Methyl-adenosine
  modified_base 79: mod_base = OTHER; note = 2'-O-Methyl-guanosine
  modified_base 80: mod_base = OTHER; note = 2'-O-Methyl-uridine
  modified_base 82: mod_base = OTHER; note = 2'-O-Methyl-guanosine
  modified_base 83: mod_base = OTHER; note = 2'-O-Methyl-cytidine
  modified_base 84: mod_base = OTHER; note = 2'-O-Methyl-adenosine
  modified_base 85: mod_base = OTHER; note = 2'-O-Methyl-cytidine
  modified_base 86: mod_base = OTHER; note = 2'-O-Methyl-cytidine
  modified_base 87: mod_base = OTHER; note = 2'-O-Methyl-guanosine
  modified_base 89: mod_base = OTHER; note = 2'-O-Methyl-guanosine
  modified_base 92: mod_base = OTHER; note = 2'-O-Methyl-guanosine
  modified_base 93: mod_base = OTHER; note = 2'-O-Methyl-guanosine
  modified_base 94: mod_base = OTHER; note = 2'-O-Methyl-uridine
  modified_base 95: mod_base = OTHER; note = 2'-O-Methyl-guanosine
  modified_base 96: mod_base = OTHER; note = 2'-O-Methyl-cytidine
  modified_base 97: mod_base = OTHER; note = 2'-O-Methyl-uridine
  modified_base 98: mod_base = OTHER; note = 2'-O-Methyl-uridine phosphorothioate
  modified_base 99: mod_base = OTHER; note = 2'-O-Methyl-uridine phosphorothioate
  modified_base 100: mod_base = OTHER; note = 2'-O-Methyl-uridine
  misc_difference 101: note = a, c, g, inosine, u, deoxyadenosine, deoxyguanosine, deoxycytidine, deoxyinosine, thymine, ribonebularine, 2'-O-methylnebularine, or 2'-deoxynebularine
  misc_difference 102: note = a, c, g, inosine, u, deoxyadenosine, deoxyguanosine, deoxycytidine, deoxyinosine, thymine, ribonebularine, 2'-O-methylnebularine, or 2'-deoxynebularine
  misc_difference 103: note = a, c, g, inosine, u, deoxyadenosine, deoxyguanosine, deoxycytidine, deoxyinosine, thymine, ribonebularine, 2'-O-methylnebularine, or 2'-deoxynebularine

SEQ ID NO: 3041 - RNA, 103 nt, synthetic construct; identical to SEQ ID NO: 1797
  source 1..103: mol_type = other RNA
  modified_base 1: mod_base = OTHER; note = 2'-O-Methyl-cytidine phosphorothioate
  modified_base 2: mod_base = OTHER; note = 2'-O-Methyl-adenosine phosphorothioate
  modified_base 3: mod_base = OTHER; note = 2'-O-Methyl-guanosine
  modified_base 21: mod_base = OTHER; note = 2'-O-Methyl-guanosine
  modified_base 28: mod_base = OTHER; note = 2'-O-Methyl-adenosine
  modified_base 29: mod_base = OTHER; note = 2'-O-Methyl-guanosine
  modified_base 30: mod_base = OTHER; note = 2'-O-Methyl-cytidine
  modified_base 31: mod_base = OTHER; note = 2'-O-Methyl-uridine
  modified_base 32: mod_base = OTHER; note = 2'-O-Methyl-adenosine
  modified_base 33: mod_base = OTHER; note = 2'-O-Methyl-guanosine
  modified_base 34: mod_base = OTHER; note = 2'-O-Methyl-adenosine
  modified_base 35: mod_base = OTHER; note = 2'-O-Methyl-adenosine
  modified_base 36: mod_base = OTHER; note = 2'-O-Methyl-adenosine
  modified_base 37: mod_base = OTHER; note = 2'-O-Methyl-uridine
  modified_base 38: mod_base = OTHER; note = 2'-O-Methyl-adenosine
  modified_base 39: mod_base = OTHER; note = 2'-O-Methyl-guanosine
  modified_base 40: mod_base = OTHER; note = 2'-O-Methyl-cytidine
  modified_base 41: mod_base = OTHER; note = 2'-O-Methyl-adenosine
  modified_base 42: mod_base = OTHER; note = 2'-O-Methyl-adenosine
  modified_base 46: mod_base = OTHER; note = 2'-O-Methyl-adenosine
  modified_base 48: mod_base = OTHER; note = 2'-O-Methyl-adenosine
  modified_base 50: mod_base = OTHER; note = 2'-O-Methyl-uridine
  modified_base 52: mod_base = OTHER; note = 2'-O-Methyl-adenosine
  modified_base 53: mod_base = OTHER; note = 2'-O-Methyl-guanosine
  modified_base 54: mod_base = OTHER; note = 2'-O-Methyl-guanosine
  modified_base 57: mod_base = OTHER; note = 2'-O-Methyl-adenosine
  modified_base 61: mod_base = OTHER; note = 2'-O-Methyl-cytidine
  modified_base 64: mod_base = OTHER; note = uridine phosphorothioate
  modified_base 66: mod_base = OTHER; note = 2'-O-Methyl-uridine
  modified_base 67: mod_base = OTHER; note = 2'-O-Methyl-cytidine
  modified_base 70: mod_base = OTHER; note = 2'-O-Methyl-cytidine
  modified_base 71: mod_base = OTHER; note = 2'-O-Methyl-uridine
  modified_base 72: mod_base = OTHER; note = 2'-O-Methyl-uridine
  modified_base 73: mod_base = OTHER; note = 2'-O-Methyl-guanosine
  modified_base 74: mod_base = OTHER; note = 2'-O-Methyl-adenosine
  modified_base 75: mod_base = OTHER; note = 2'-O-Methyl-adenosine
  modified_base 76: mod_base = OTHER; note = 2'-O-Methyl-adenosine
  modified_base 77: mod_base = OTHER; note = 2'-O-Methyl-adenosine
  modified_base 78: mod_base = OTHER; note = 2'-O-Methyl-adenosine
  modified_base 79: mod_base = OTHER; note = 2'-O-Methyl-guanosine
  modified_base 80: mod_base = OTHER; note = 2'-O-Methyl-uridine
  modified_base 82: mod_base = OTHER; note = 2'-O-Methyl-guanosine
  modified_base 83: mod_base = OTHER; note = 2'-O-Methyl-cytidine
  modified_base 84: mod_base = OTHER; note = 2'-O-Methyl-adenosine
  modified_base 85: mod_base = OTHER; note = 2'-O-Methyl-cytidine
  modified_base 86: mod_base = OTHER; note = 2'-O-Methyl-cytidine
  modified_base 87: mod_base = OTHER; note = 2'-O-Methyl-guanosine
  modified_base 89: mod_base = OTHER; note = 2'-O-Methyl-guanosine
  modified_base 91: mod_base = OTHER; note = 2'-O-Methyl-cytidine
  modified_base 92: mod_base = OTHER; note = 2'-O-Methyl-guanosine
  modified_base 93: mod_base = OTHER; note = 2'-O-Methyl-guanosine
  modified_base 94: mod_base = OTHER; note = 2'-O-Methyl-uridine
  modified_base 95: mod_base = OTHER; note = 2'-O-Methyl-guanosine
  modified_base 96: mod_base = OTHER; note = 2'-O-Methyl-cytidine
  modified_base 97: mod_base = OTHER; note = 2'-O-Methyl-uridine
  modified_base 98: mod_base = OTHER; note = 2'-O-Methyl-uridine phosphorothioate
  modified_base 99: mod_base = OTHER; note = 2'-O-Methyl-uridine phosphorothioate
  modified_base 100: mod_base = OTHER; note = 2'-O-Methyl-uridine
  misc_difference 101: note = a, c, g, inosine, u, deoxyadenosine, deoxyguanosine, deoxycytidine, deoxyinosine, thymine, ribonebularine, 2'-O-methylnebularine, or 2'-deoxynebularine
  misc_difference 102: note = a, c, g, inosine, u, deoxyadenosine, deoxyguanosine, deoxycytidine, deoxyinosine, thymine, ribonebularine, 2'-O-methylnebularine, or 2'-deoxynebularine
  misc_difference 103: note = a, c, g, inosine, u, deoxyadenosine, deoxyguanosine, deoxycytidine, deoxyinosine, thymine, ribonebularine, 2'-O-methylnebularine, or 2'-deoxynebularine

SEQ ID NO: 3042 - RNA, 103 nt, synthetic construct; identical to SEQ ID NO: 1797
  source 1..103: mol_type = other RNA
  modified_base 1: mod_base = OTHER; note = 2'-O-Methyl-cytidine phosphorothioate
  modified_base 2: mod_base = OTHER; note = 2'-O-Methyl-adenosine phosphorothioate
  modified_base 3: mod_base = OTHER; note = 2'-O-Methyl-guanosine
  modified_base 21: mod_base = OTHER; note = 2'-O-Methyl-guanosine
  modified_base 28: mod_base = OTHER; note = 2'-O-Methyl-adenosine
  modified_base 29: mod_base = OTHER; note = 2'-O-Methyl-guanosine
  modified_base 30: mod_base = OTHER; note = 2'-O-Methyl-cytidine
  modified_base 31: mod_base = OTHER; note = 2'-O-Methyl-uridine
  modified_base 32: mod_base = OTHER; note = 2'-O-Methyl-adenosine
  modified_base 34: mod_base = OTHER; note = 2'-O-Methyl-adenosine
  modified_base 35: mod_base = OTHER; note = 2'-O-Methyl-adenosine
  modified_base 36: mod_base = OTHER; note = 2'-O-Methyl-adenosine
  modified_base 37: mod_base = OTHER; note = 2'-O-Methyl-uridine
  modified_base 38: mod_base = OTHER; note = 2'-O-Methyl-adenosine
  modified_base 39: mod_base = OTHER; note = 2'-O-Methyl-guanosine
  modified_base 40: mod_base = OTHER; note = 2'-O-Methyl-cytidine
  modified_base 41: mod_base = OTHER; note = 2'-O-Methyl-adenosine
  modified_base 42: mod_base = OTHER; note = 2'-O-Methyl-adenosine
  modified_base 46: mod_base = OTHER; note = 2'-O-Methyl-adenosine
  modified_base 48: mod_base = OTHER; note = 2'-O-Methyl-adenosine
  modified_base 50: mod_base = OTHER; note = 2'-O-Methyl-uridine
  modified_base 52: mod_base = OTHER; note = 2'-O-Methyl-adenosine
  modified_base 53: mod_base = OTHER; note = 2'-O-Methyl-guanosine
  modified_base 54: mod_base = OTHER; note = 2'-O-Methyl-guanosine
  modified_base 57: mod_base = OTHER; note = 2'-O-Methyl-adenosine
  modified_base 61: mod_base = OTHER; note = 2'-O-Methyl-cytidine
  modified_base 64: mod_base = OTHER; note = uridine phosphorothioate
  modified_base 66: mod_base = OTHER; note = 2'-O-Methyl-uridine
  modified_base 67: mod_base = OTHER; note = 2'-O-Methyl-cytidine
  modified_base 70: mod_base = OTHER; note = 2'-O-Methyl-cytidine
  modified_base 71: mod_base = OTHER; note = 2'-O-Methyl-uridine
  modified_base 72: mod_base = OTHER; note = 2'-O-Methyl-uridine
  modified_base 73: mod_base = OTHER; note = 2'-O-Methyl-guanosine
  modified_base 74: mod_base = OTHER; note = 2'-O-Methyl-adenosine
  modified_base 75: mod_base = OTHER; note = 2'-O-Methyl-adenosine
  modified_base 76: mod_base = OTHER; note = 2'-O-Methyl-adenosine
  modified_base 77: mod_base = OTHER; note = 2'-O-Methyl-adenosine
  modified_base 78: mod_base = OTHER; note = 2'-O-Methyl-adenosine
  modified_base 79: mod_base = OTHER; note = 2'-O-Methyl-guanosine
  modified_base 80: mod_base = OTHER; note = 2'-O-Methyl-uridine
  modified_base 82: mod_base = OTHER; note = 2'-O-Methyl-guanosine
  modified_base 83: mod_base = OTHER; note = 2'-O-Methyl-cytidine
  modified_base 84: mod_base = OTHER; note = 2'-O-Methyl-adenosine
  modified_base 85: mod_base = OTHER; note = 2'-O-Methyl-cytidine
  modified_base 86: mod_base = OTHER; note = 2'-O-Methyl-cytidine
  modified_base 87: mod_base = OTHER; note = 2'-O-Methyl-guanosine
  modified_base 89: mod_base = OTHER; note = 2'-O-Methyl-guanosine
  modified_base 92: mod_base = OTHER; note = 2'-O-Methyl-guanosine
  modified_base 93: mod_base = OTHER; note = 2'-O-Methyl-guanosine
  modified_base 94: mod_base = OTHER; note = 2'-O-Methyl-uridine
  modified_base 95: mod_base = OTHER; note = 2'-O-Methyl-guanosine
  modified_base 96: mod_base = OTHER; note = 2'-O-Methyl-cytidine
  modified_base 97: mod_base = OTHER; note = 2'-O-Methyl-uridine
  modified_base 98: mod_base = OTHER; note = 2'-O-Methyl-uridine phosphorothioate
  modified_base 99: mod_base = OTHER; note = 2'-O-Methyl-uridine phosphorothioate
  modified_base 100: mod_base = OTHER; note = 2'-O-Methyl-uridine
  misc_difference 101: note = a, c, g, inosine, u, deoxyadenosine, deoxyguanosine, deoxycytidine, deoxyinosine, thymine, ribonebularine, 2'-O-methylnebularine, or 2'-deoxynebularine
  misc_difference 102: note = a, c, g, inosine, u, deoxyadenosine, deoxyguanosine, deoxycytidine, deoxyinosine, thymine, ribonebularine, 2'-O-methylnebularine, or 2'-deoxynebularine
  misc_difference 103: note = a, c, g, inosine, u, deoxyadenosine, deoxyguanosine, deoxycytidine, deoxyinosine, thymine, ribonebularine, 2'-O-methylnebularine, or 2'-deoxynebularine

SEQ ID NO: 3043 - RNA, 103 nt, synthetic construct; identical to SEQ ID NO: 1797
  source 1..103: mol_type = other RNA
  modified_base 1: mod_base = OTHER; note = 2'-O-Methyl-cytidine phosphorothioate
  modified_base 2: mod_base = OTHER; note = 2'-O-Methyl-adenosine phosphorothioate
  modified_base 3: mod_base = OTHER; note = 2'-O-Methyl-guanosine
  modified_base 21: mod_base = OTHER; note = 2'-O-Methyl-guanosine
  modified_base 28: mod_base = OTHER; note = 2'-O-Methyl-adenosine
  modified_base 29: mod_base = OTHER; note = 2'-O-Methyl-guanosine
  modified_base 30: mod_base = OTHER; note = 2'-O-Methyl-cytidine
  modified_base 31: mod_base = OTHER; note = 2'-O-Methyl-uridine
  modified_base 32: mod_base = OTHER; note = 2'-O-Methyl-adenosine
  modified_base 34: mod_base = OTHER; note = 2'-O-Methyl-adenosine
  modified_base 35: mod_base = OTHER; note = 2'-O-Methyl-adenosine
  modified_base 36: mod_base = OTHER; note = 2'-O-Methyl-adenosine
  modified_base 37: mod_base = OTHER; note = 2'-O-Methyl-uridine
  modified_base 38: mod_base = OTHER; note = 2'-O-Methyl-adenosine
  modified_base 39: mod_base = OTHER; note = 2'-O-Methyl-guanosine
  modified_base 40: mod_base = OTHER; note = 2'-O-Methyl-cytidine
  modified_base 41: mod_base = OTHER; note = 2'-O-Methyl-adenosine
  modified_base 42: mod_base = OTHER; note = 2'-O-Methyl-adenosine
  modified_base 46: mod_base = OTHER; note = 2'-O-Methyl-adenosine
  modified_base 48: mod_base = OTHER; note = 2'-O-Methyl-adenosine
  modified_base 50: mod_base = OTHER; note = 2'-O-Methyl-uridine
  modified_base 52: mod_base = OTHER; note = 2'-O-Methyl-adenosine
  modified_base 53: mod_base = OTHER; note = 2'-O-Methyl-guanosine
  modified_base 54: mod_base = OTHER; note = 2'-O-Methyl-guanosine
  modified_base 57: mod_base = OTHER; note = 2'-O-Methyl-adenosine
  modified_base 61: mod_base = OTHER; note = 2'-O-Methyl-cytidine
  modified_base 64: mod_base = OTHER; note = uridine phosphorothioate
  modified_base 66: mod_base = OTHER; note = 2'-O-Methyl-uridine
  modified_base 67: mod_base = OTHER; note = 2'-O-Methyl-cytidine
  modified_base 70: mod_base = OTHER; note = 2'-O-Methyl-cytidine
  modified_base 71: mod_base = OTHER; note = 2'-O-Methyl-uridine
  modified_base 72: mod_base = OTHER; note = 2'-O-Methyl-uridine
  modified_base 73: mod_base = OTHER; note = 2'-O-Methyl-guanosine
  modified_base 74: mod_base = OTHER; note = 2'-O-Methyl-adenosine
  modified_base 75: mod_base = OTHER; note = 2'-O-Methyl-adenosine
  modified_base 76: mod_base = OTHER; note = 2'-O-Methyl-adenosine
  modified_base 77: mod_base = OTHER; note = 2'-O-Methyl-adenosine
  modified_base 78: mod_base = OTHER; note = 2'-O-Methyl-adenosine
  modified_base 79: mod_base = OTHER; note = 2'-O-Methyl-guanosine
  modified_base 80: mod_base = OTHER; note = 2'-O-Methyl-uridine
  modified_base 82: mod_base = OTHER; note = 2'-O-Methyl-guanosine
  modified_base 83: mod_base = OTHER; note = 2'-O-Methyl-cytidine
  modified_base 84: mod_base = OTHER; note = 2'-O-Methyl-adenosine
  modified_base 85: mod_base = OTHER; note = 2'-O-Methyl-cytidine
  modified_base 86: mod_base = OTHER; note = 2'-O-Methyl-cytidine
  modified_base 87: mod_base = OTHER; note = 2'-O-Methyl-guanosine
  modified_base 89: mod_base = OTHER; note = 2'-O-Methyl-guanosine
  modified_base 91: mod_base = OTHER; note = 2'-O-Methyl-cytidine
  modified_base 92: mod_base = OTHER; note = 2'-O-Methyl-guanosine
  modified_base 93: mod_base = OTHER; note = 2'-O-Methyl-guanosine
  modified_base 94: mod_base = OTHER; note = 2'-O-Methyl-uridine
  modified_base 95: mod_base = OTHER; note = 2'-O-Methyl-guanosine
  modified_base 96: mod_base = OTHER; note = 2'-O-Methyl-cytidine
  modified_base 97: mod_base = OTHER; note = 2'-O-Methyl-uridine
  modified_base 98: mod_base = OTHER; note = 2'-O-Methyl-uridine phosphorothioate
  modified_base 99: mod_base = OTHER; note = 2'-O-Methyl-uridine phosphorothioate
  modified_base 100: mod_base = OTHER; note = 2'-O-Methyl-uridine
  misc_difference 101: note = a, c, g, inosine, u, deoxyadenosine, deoxyguanosine, deoxycytidine, deoxyinosine, thymine, ribonebularine, 2'-O-methylnebularine, or 2'-deoxynebularine
  misc_difference 102: note = a, c, g, inosine, u, deoxyadenosine, deoxyguanosine, deoxycytidine, deoxyinosine, thymine, ribonebularine, 2'-O-methylnebularine, or 2'-deoxynebularine
  misc_difference 103: note = a, c, g, inosine, u, deoxyadenosine, deoxyguanosine, deoxycytidine, deoxyinosine, thymine, ribonebularine, 2'-O-methylnebularine, or 2'-deoxynebularine

SEQ ID NO: 3044 - RNA, 103 nt, synthetic construct; identical to SEQ ID NO: 1797
  source 1..103: mol_type = other RNA
  modified_base 1: mod_base = OTHER; note = 2'-O-Methyl-cytidine phosphorothioate
  modified_base 2: mod_base = OTHER; note = 2'-O-Methyl-adenosine phosphorothioate
  modified_base 3: mod_base = OTHER; note = 2'-O-Methyl-guanosine
  modified_base 21: mod_base = OTHER; note = 2'-O-Methyl-guanosine
  modified_base 28: mod_base = OTHER; note = 2'-O-Methyl-adenosine
  modified_base 29: mod_base = OTHER; note = 2'-O-Methyl-guanosine
  modified_base 30: mod_base = OTHER; note = 2'-O-Methyl-cytidine
  modified_base 31: mod_base = OTHER; note = 2'-O-Methyl-uridine
  modified_base 32: mod_base = OTHER; note = 2'-O-Methyl-adenosine
  modified_base 34: mod_base = OTHER; note = 2'-O-Methyl-adenosine
  modified_base 35: mod_base = OTHER; note = 2'-O-Methyl-adenosine
  modified_base 36: mod_base = OTHER; note = 2'-O-Methyl-adenosine
  modified_base 37: mod_base = OTHER; note = 2'-O-Methyl-uridine
  modified_base 38: mod_base = OTHER; note = 2'-O-Methyl-adenosine
  modified_base 39: mod_base = OTHER; note = 2'-O-Methyl-guanosine
  modified_base 40: mod_base = OTHER; note = 2'-O-Methyl-cytidine
  modified_base 41: mod_base = OTHER; note = 2'-O-Methyl-adenosine
  modified_base 42: mod_base = OTHER; note = 2'-O-Methyl-adenosine
  modified_base 46: mod_base = OTHER; note = 2'-O-Methyl-adenosine
  modified_base 48: mod_base = OTHER; note = 2'-O-Methyl-adenosine
  modified_base 50: mod_base = OTHER; note = 2'-O-Methyl-uridine
  modified_base 52: mod_base = OTHER; note = 2'-O-Methyl-adenosine
  modified_base 53: mod_base = OTHER; note = 2'-O-Methyl-guanosine
  modified_base 54: mod_base = OTHER; note = 2'-O-Methyl-guanosine
  modified_base 55: mod_base = OTHER; note = 2'-O-Methyl-cytidine
  modified_base 56: mod_base = OTHER; note = 2'-O-Methyl-uridine
  modified_base 57: mod_base = OTHER; note = 2'-O-Methyl-adenosine
  modified_base 60: mod_base = OTHER; note = 2'-O-Methyl-cytidine
  modified_base 61: mod_base = OTHER; note = 2'-O-Methyl-cytidine
  modified_base 64: mod_base = OTHER; note = uridine phosphorothioate
  modified_base 66: mod_base = OTHER; note = 2'-O-Methyl-uridine
  modified_base 67: mod_base = OTHER; note = 2'-O-Methyl-cytidine
  modified_base 70: mod_base = OTHER; note = 2'-O-Methyl-cytidine
  modified_base 71: mod_base = OTHER; note = 2'-O-Methyl-uridine
  modified_base 72: mod_base = OTHER; note = 2'-O-Methyl-uridine
  modified_base 74: mod_base = OTHER; note = 2'-O-Methyl-adenosine
  modified_base 75: mod_base = OTHER; note = 2'-O-Methyl-adenosine
  modified_base 76: mod_base = OTHER; note = 2'-O-Methyl-adenosine
  modified_base 77: mod_base = OTHER; note = 2'-O-Methyl-adenosine
  modified_base 78: mod_base = OTHER; note = 2'-O-Methyl-adenosine
  modified_base 79: mod_base = OTHER; note = 2'-O-Methyl-guanosine
  modified_base 80: mod_base = OTHER; note = 2'-O-Methyl-uridine
  modified_base 82: mod_base = OTHER; note = 2'-O-Methyl-guanosine
  modified_base 83: mod_base = OTHER; note = 2'-O-Methyl-cytidine
  modified_base 84: mod_base = OTHER; note = 2'-O-Methyl-adenosine
  modified_base 85: mod_base = OTHER; note = 2'-O-Methyl-cytidine
  modified_base 86: mod_base = OTHER; note = 2'-O-Methyl-cytidine
  modified_base 87: mod_base = OTHER; note = 2'-O-Methyl-guanosine
  modified_base 89: mod_base = OTHER; note = 2'-O-Methyl-guanosine
  modified_base 92: mod_base = OTHER; note = 2'-O-Methyl-guanosine
  modified_base 93: mod_base = OTHER; note = 2'-O-Methyl-guanosine
  modified_base 94: mod_base = OTHER; note = 2'-O-Methyl-uridine
  modified_base 95: mod_base = OTHER; note = 2'-O-Methyl-guanosine
  modified_base 96: mod_base = OTHER; note = 2'-O-Methyl-cytidine
  modified_base 97: mod_base = OTHER; note = 2'-O-Methyl-uridine
  modified_base 98: mod_base = OTHER; note = 2'-O-Methyl-uridine phosphorothioate
  modified_base 99: mod_base = OTHER; note = 2'-O-Methyl-uridine phosphorothioate
  modified_base 100: mod_base = OTHER; note = 2'-O-Methyl-uridine
  misc_difference 101: note = a, c, g, inosine, u, deoxyadenosine, deoxyguanosine, deoxycytidine, deoxyinosine, thymine, ribonebularine, 2'-O-methylnebularine, or 2'-deoxynebularine
  misc_difference 102: note = a, c, g, inosine, u, deoxyadenosine, deoxyguanosine, deoxycytidine, deoxyinosine, thymine, ribonebularine, 2'-O-methylnebularine, or 2'-deoxynebularine
  misc_difference 103: note = a, c, g, inosine, u, deoxyadenosine, deoxyguanosine, deoxycytidine, deoxyinosine, thymine, ribonebularine, 2'-O-methylnebularine, or 2'-deoxynebularine

SEQ ID NO: 3045 - RNA, 103 nt, synthetic construct; identical to SEQ ID NO: 1795
  source 1..103: mol_type = other RNA
  modified_base 1: mod_base = OTHER; note = 2'-O-Methyl-cytidine phosphorothioate
  modified_base 2: mod_base = OTHER; note = 2'-O-Methyl-cytidine phosphorothioate
  modified_base 3: mod_base = OTHER; note = 2'-O-Methyl-cytidine
  modified_base 21: mod_base = OTHER; note = 2'-O-Methyl-guanosine
  modified_base 28: mod_base = OTHER; note = 2'-O-Methyl-adenosine
  modified_base 29: mod_base = OTHER; note = 2'-O-Methyl-guanosine
  modified_base 30: mod_base = OTHER; note = 2'-O-Methyl-cytidine
  modified_base 31: mod_base = OTHER; note = 2'-O-Methyl-uridine
  modified_base 32: mod_base = OTHER; note = 2'-O-Methyl-adenosine
  modified_base 33: mod_base = OTHER; note = 2'-O-Methyl-guanosine
  modified_base 34: mod_base = OTHER; note = 2'-O-Methyl-adenosine
  modified_base 35: mod_base = OTHER; note = 2'-O-Methyl-adenosine
  modified_base 36: mod_base = OTHER; note = 2'-O-Methyl-adenosine
  modified_base 37: mod_base = OTHER; note = 2'-O-Methyl-uridine
  modified_base 38: mod_base = OTHER; note = 2'-O-Methyl-adenosine
  modified_base 39: mod_base = OTHER; note = 2'-O-Methyl-guanosine
  modified_base 40: mod_base = OTHER; note = 2'-O-Methyl-cytidine
  modified_base 41: mod_base = OTHER; note = 2'-O-Methyl-adenosine
  modified_base 42: mod_base = OTHER; note = 2'-O-Methyl-adenosine
  modified_base 45: mod_base = OTHER; note = uridine phosphorothioate
  modified_base 46: mod_base = OTHER; note = 2'-O-Methyl-adenosine
  modified_base 48: mod_base = OTHER; note = 2'-O-Methyl-adenosine
  modified_base 50: mod_base = OTHER; note = 2'-O-Methyl-uridine
  modified_base 52: mod_base = OTHER; note = 2'-O-Methyl-adenosine
  modified_base 53: mod_base = OTHER; note = 2'-O-Methyl-guanosine
  modified_base 54: mod_base = OTHER; note = 2'-O-Methyl-guanosine
  modified_base 55: mod_base = OTHER; note = 2'-O-Methyl-cytidine
  modified_base 56: mod_base = OTHER; note = 2'-O-Methyl-uridine
  modified_base 57: mod_base = OTHER; note = 2'-O-Methyl-adenosine
  modified_base 60: mod_base = OTHER; note = 2'-O-Methyl-cytidine
  modified_base 61: mod_base = OTHER; note = 2'-O-Methyl-cytidine
  modified_base 66: mod_base = OTHER; note = 2'-O-Methyl-uridine
  modified_base 67: mod_base = OTHER; note = 2'-O-Methyl-cytidine
  modified_base 70: mod_base = OTHER; note = 2'-O-Methyl-cytidine
  modified_base 71: mod_base = OTHER; note = 2'-O-Methyl-uridine
  modified_base 72: mod_base = OTHER; note = 2'-O-Methyl-uridine
  modified_base 73: mod_base = OTHER; note = 2'-O-Methyl-guanosine
  modified_base 74: mod_base = OTHER; note = 2'-O-Methyl-adenosine
  modified_base 75: mod_base = OTHER; note = 2'-O-Methyl-adenosine
  modified_base 76: mod_base = OTHER; note = 2'-O-Methyl-adenosine
  modified_base 77: mod_base = OTHER; note = 2'-O-Methyl-adenosine
  modified_base 78: mod_base = OTHER; note = 2'-O-Methyl-adenosine
  modified_base 79: mod_base = OTHER; note = 2'-O-Methyl-guanosine
  modified_base 80: mod_base = OTHER; note = 2'-O-Methyl-uridine
  modified_base 81: mod_base = OTHER; note = 2'-O-Methyl-guanosine
  modified_base 83: mod_base = OTHER; note = 2'-O-Methyl-cytidine
  modified_base 84: mod_base = OTHER; note = 2'-O-Methyl-adenosine
  modified_base 85: mod_base = OTHER; note = 2'-O-Methyl-cytidine
  modified_base 86: mod_base = OTHER; note = 2'-O-Methyl-cytidine
  modified_base 87: mod_base = OTHER; note = 2'-O-Methyl-guanosine
  modified_base 88: mod_base = OTHER; note = 2'-O-Methyl-adenosine
  modified_base 89: mod_base = OTHER; note = 2'-O-Methyl-guanosine
  modified_base 90: mod_base = OTHER; note = 2'-O-Methyl-uridine
  modified_base 91: mod_base = OTHER; note = 2'-O-Methyl-cytidine
  modified_base 92: mod_base = OTHER; note = 2'-O-Methyl-guanosine
  modified_base 93: mod_base = OTHER; note = 2'-O-Methyl-guanosine
  modified_base 94: mod_base = OTHER; note = 2'-O-Methyl-uridine
  modified_base 95: mod_base = OTHER; note = 2'-O-Methyl-guanosine
  modified_base 96: mod_base = OTHER; note = 2'-O-Methyl-cytidine
  modified_base 97: mod_base = OTHER; note = 2'-O-Methyl-uridine
  modified_base 98: mod_base = OTHER; note = 2'-O-Methyl-uridine phosphorothioate
  modified_base 99: mod_base = OTHER; note = 2'-O-Methyl-uridine phosphorothioate
  modified_base 100: mod_base = OTHER; note = 2'-O-Methyl-uridine
  misc_difference 101: note = a, c, g, inosine, u, deoxyadenosine, deoxyguanosine, deoxycytidine, deoxyinosine, thymine, ribonebularine, 2'-O-methylnebularine, or 2'-deoxynebularine
  misc_difference 102: note = a, c, g, inosine, u, deoxyadenosine, deoxyguanosine, deoxycytidine, deoxyinosine, thymine, ribonebularine, 2'-O-methylnebularine, or 2'-deoxynebularine
  misc_difference 103: note = a, c, g, inosine, u, deoxyadenosine, deoxyguanosine, deoxycytidine, deoxyinosine, thymine, ribonebularine, 2'-O-methylnebularine, or 2'-deoxynebularine

SEQ ID NO: 3046 - RNA, 103 nt, synthetic construct; identical to SEQ ID NO: 1795
  source 1..103: mol_type = other RNA
  modified_base 1: mod_base = OTHER; note = 2'-O-Methyl-cytidine phosphorothioate
  modified_base 2: mod_base = OTHER; note = 2'-O-Methyl-cytidine phosphorothioate
  modified_base 3: mod_base = OTHER; note = 2'-O-Methyl-cytidine
  modified_base 21: mod_base = OTHER; note = 2'-O-Methyl-guanosine
  modified_base 28: mod_base = OTHER; note = 2'-O-Methyl-adenosine
  modified_base 29: mod_base = OTHER; note = 2'-O-Methyl-guanosine
  modified_base 30: mod_base = OTHER; note = 2'-O-Methyl-cytidine
  modified_base 31: mod_base = OTHER; note = 2'-O-Methyl-uridine
  modified_base 32: mod_base = OTHER; note = 2'-O-Methyl-adenosine
  modified_base 34: mod_base = OTHER; note = 2'-O-Methyl-adenosine
  modified_base 35: mod_base = OTHER; note = 2'-O-Methyl-adenosine
  modified_base 36: mod_base = OTHER; note = 2'-O-Methyl-adenosine
  modified_base 37: mod_base = OTHER; note = 2'-O-Methyl-uridine
  modified_base 38: mod_base = OTHER; note = 2'-O-Methyl-adenosine
  modified_base 39: mod_base = OTHER; note = 2'-O-Methyl-guanosine
  modified_base 40: mod_base = OTHER; note = 2'-O-Methyl-cytidine
  modified_base 41: mod_base = OTHER; note = 2'-O-Methyl-adenosine
  modified_base 42: mod_base = OTHER; note = 2'-O-Methyl-adenosine
  modified_base 45: mod_base = OTHER; note = uridine phosphorothioate
  modified_base 46: mod_base = OTHER; note = 2'-O-Methyl-adenosine
  modified_base 48: mod_base = OTHER; note = 2'-O-Methyl-adenosine
  modified_base 50: mod_base = OTHER; note = 2'-O-Methyl-uridine
  modified_base 52: mod_base = OTHER; note = 2'-O-Methyl-adenosine
  modified_base 53: mod_base = OTHER; note = 2'-O-Methyl-guanosine
  modified_base 54: mod_base = OTHER; note = 2'-O-Methyl-guanosine
  modified_base 55: mod_base = OTHER; note = 2'-O-Methyl-cytidine
  modified_base 56: mod_base = OTHER; note = 2'-O-Methyl-uridine
  modified_base 57: mod_base = OTHER; note = 2'-O-Methyl-adenosine
  modified_base 60: mod_base = OTHER; note = 2'-O-Methyl-cytidine
  modified_base 61: mod_base = OTHER; note = 2'-O-Methyl-cytidine
  modified_base 66: mod_base = OTHER; note = 2'-O-Methyl-uridine
  modified_base 67: mod_base = OTHER; note = 2'-O-Methyl-cytidine
  modified_base 70: mod_base = OTHER; note = 2'-O-Methyl-cytidine
  modified_base 71: mod_base = OTHER; note = 2'-O-Methyl-uridine
  modified_base 72: mod_base = OTHER; note = 2'-O-Methyl-uridine
  modified_base 74: mod_base = OTHER; note = 2'-O-Methyl-adenosine
  modified_base 75: mod_base = OTHER; note = 2'-O-Methyl-adenosine
  modified_base 76: mod_base = OTHER; note = 2'-O-Methyl-adenosine
  modified_base 77: mod_base = OTHER; note = 2'-O-Methyl-adenosine
  modified_base 78: mod_base = OTHER; note = 2'-O-Methyl-adenosine
  modified_base 79: mod_base = OTHER; note = 2'-O-Methyl-guanosine
  modified_base 80: mod_base = OTHER; note = 2'-O-Methyl-uridine
  modified_base 81: mod_base = OTHER; note = 2'-O-Methyl-guanosine
  modified_base 83: mod_base = OTHER; note = 2'-O-Methyl-cytidine
  modified_base 84: mod_base = OTHER; note = 2'-O-Methyl-adenosine
  modified_base 85: mod_base = OTHER; note = 2'-O-Methyl-cytidine
  modified_base 86: mod_base = OTHER; note = 2'-O-Methyl-cytidine
  modified_base 87: mod_base = OTHER; note = 2'-O-Methyl-guanosine
  modified_base 88: mod_base = OTHER; note = 2'-O-Methyl-adenosine
  modified_base 89: mod_base = OTHER; note = 2'-O-Methyl-guanosine
  modified_base 90: mod_base = OTHER; note = 2'-O-Methyl-uridine
  modified_base 91: mod_base = OTHER; note = 2'-O-Methyl-cytidine
  modified_base 92: mod_base = OTHER; note = 2'-O-Methyl-guanosine
  modified_base 93: mod_base = OTHER; note = 2'-O-Methyl-guanosine
  modified_base 94: mod_base = OTHER; note = 2'-O-Methyl-uridine
  modified_base 95: mod_base = OTHER; note = 2'-O-Methyl-guanosine
  modified_base 96: mod_base = OTHER; note = 2'-O-Methyl-cytidine
  modified_base 97: mod_base = OTHER; note = 2'-O-Methyl-uridine
  modified_base 98: mod_base = OTHER; note = 2'-O-Methyl-uridine phosphorothioate
  modified_base 99: mod_base = OTHER; note = 2'-O-Methyl-uridine phosphorothioate
  modified_base 100: mod_base = OTHER; note = 2'-O-Methyl-uridine
  misc_difference 101: note = a, c, g, inosine, u, deoxyadenosine, deoxyguanosine, deoxycytidine, deoxyinosine, thymine, ribonebularine, 2'-O-methylnebularine, or 2'-deoxynebularine
  misc_difference 102: note = a, c, g, inosine, u, deoxyadenosine, deoxyguanosine, deoxycytidine, deoxyinosine, thymine, ribonebularine, 2'-O-methylnebularine, or 2'-deoxynebularine
  misc_difference 103: note = a, c, g, inosine, u, deoxyadenosine, deoxyguanosine, deoxycytidine, deoxyinosine, thymine, ribonebularine, 2'-O-methylnebularine, or 2'-deoxynebularine

SEQ ID NO: 3047 - RNA, 103 nt, synthetic construct; identical to SEQ ID NO: 1796
  source 1..103: mol_type = other RNA
  modified_base 1: mod_base = OTHER; note = 2'-O-Methyl-guanosine phosphorothioate
  modified_base 2: mod_base = OTHER; note = 2'-O-Methyl-adenosine phosphorothioate
  modified_base 3: mod_base = OTHER; note = 2'-O-Methyl-guanosine
  modified_base 21: mod_base = OTHER; note = 2'-O-Methyl-guanosine
  modified_base 28: mod_base = OTHER; note = 2'-O-Methyl-adenosine
  modified_base 29: mod_base = OTHER; note = 2'-O-Methyl-guanosine
  modified_base 30: mod_base = OTHER; note = 2'-O-Methyl-cytidine
  modified_base 31: mod_base = OTHER; note = 2'-O-Methyl-uridine
  modified_base 32: mod_base = OTHER; note = 2'-O-Methyl-adenosine
  modified_base 33: mod_base = OTHER; note = 2'-O-Methyl-guanosine
  modified_base 34: mod_base = OTHER; note = 2'-O-Methyl-adenosine
  modified_base 35: mod_base = OTHER; note = 2'-O-Methyl-adenosine
  modified_base 36: mod_base = OTHER; note = 2'-O-Methyl-adenosine
  modified_base 37: mod_base = OTHER; note = 2'-O-Methyl-uridine
  modified_base 38: mod_base = OTHER; note = 2'-O-Methyl-adenosine
  modified_base 39: mod_base = OTHER; note = 2'-O-Methyl-guanosine
  modified_base 40: mod_base = OTHER; note = 2'-O-Methyl-cytidine
  modified_base 41: mod_base = OTHER; note = 2'-O-Methyl-adenosine
  modified_base 42: mod_base = OTHER; note = 2'-O-Methyl-adenosine
  modified_base 45: mod_base = OTHER; note = uridine phosphorothioate
  modified_base 46: mod_base = OTHER; note = 2'-O-Methyl-adenosine
  modified_base 48: mod_base = OTHER; note = 2'-O-Methyl-adenosine
  modified_base 50: mod_base = OTHER; note = 2'-O-Methyl-uridine
  modified_base 52: mod_base = OTHER; note = 2'-O-Methyl-adenosine
  modified_base 53: mod_base = OTHER; note = 2'-O-Methyl-guanosine
  modified_base 54: mod_base = OTHER; note = 2'-O-Methyl-guanosine
  modified_base 55: mod_base = OTHER; note = 2'-O-Methyl-cytidine
  modified_base 56: mod_base = OTHER; note = 2'-O-Methyl-uridine
  modified_base 57: mod_base = OTHER; note = 2'-O-Methyl-adenosine
  modified_base 60: mod_base = OTHER; note = 2'-O-Methyl-cytidine
  modified_base 61: mod_base = OTHER; note = 2'-O-Methyl-cytidine
  modified_base 66: mod_base = OTHER; note = 2'-O-Methyl-uridine
  modified_base 67: mod_base = OTHER; note = 2'-O-Methyl-cytidine
  modified_base 70: mod_base = OTHER; note = 2'-O-Methyl-cytidine
  modified_base 71: mod_base = OTHER; note = 2'-O-Methyl-uridine
  modified_base 72: mod_base = OTHER; note = 2'-O-Methyl-uridine
  modified_base 73: mod_base = OTHER; note = 2'-O-Methyl-guanosine
  modified_base 74: mod_base = OTHER; note = 2'-O-Methyl-adenosine
  modified_base 75: mod_base = OTHER; note = 2'-O-Methyl-adenosine
  modified_base 76: mod_base = OTHER; note = 2'-O-Methyl-adenosine
  modified_base 77: mod_base = OTHER; note = 2'-O-Methyl-adenosine
  modified_base 78: mod_base = OTHER; note = 2'-O-Methyl-adenosine
  modified_base 79: mod_base = OTHER; note = 2'-O-Methyl-guanosine
  modified_base 80: mod_base = OTHER; note = 2'-O-Methyl-uridine
  modified_base 81: mod_base = OTHER; note = 2'-O-Methyl-guanosine
  modified_base 83: mod_base = OTHER; note = 2'-O-Methyl-cytidine
  modified_base 84: mod_base = OTHER; note = 2'-O-Methyl-adenosine
  modified_base 85: mod_base = OTHER; note = 2'-O-Methyl-cytidine
  modified_base 86: mod_base = OTHER; note = 2'-O-Methyl-cytidine
  modified_base 87: mod_base = OTHER; note = 2'-O-Methyl-guanosine
  modified_base 88: mod_base = OTHER; note = 2'-O-Methyl-adenosine
  modified_base 89: mod_base = OTHER; note = 2'-O-Methyl-guanosine
  modified_base 90: mod_base = OTHER; note = 2'-O-Methyl-uridine
  modified_base 91: mod_base = OTHER; note = 2'-O-Methyl-cytidine
  modified_base 92: mod_base = OTHER; note = 2'-O-Methyl-guanosine
  modified_base 93: mod_base = OTHER; note = 2'-O-Methyl-guanosine
  modified_base 94: mod_base = OTHER; note = 2'-O-Methyl-uridine
  modified_base 95: mod_base = OTHER; note = 2'-O-Methyl-guanosine
  modified_base 96: mod_base = OTHER; note = 2'-O-Methyl-cytidine
  modified_base 97: mod_base = OTHER; note = 2'-O-Methyl-uridine
  modified_base 98: mod_base = OTHER; note = 2'-O-Methyl-uridine phosphorothioate
  modified_base 99: mod_base = OTHER; note = 2'-O-Methyl-uridine phosphorothioate
  modified_base 100: mod_base = OTHER; note = 2'-O-Methyl-uridine
  misc_difference 101: note = a, c, g, inosine, u, deoxyadenosine, deoxyguanosine, deoxycytidine, deoxyinosine, thymine, ribonebularine, 2'-O-methylnebularine, or 2'-deoxynebularine
  misc_difference 102: note = a, c, g, inosine, u, deoxyadenosine, deoxyguanosine, deoxycytidine, deoxyinosine, thymine, ribonebularine, 2'-O-methylnebularine, or 2'-deoxynebularine
  misc_difference 103: note = a, c, g, inosine, u, deoxyadenosine, deoxyguanosine, deoxycytidine, deoxyinosine, thymine, ribonebularine, 2'-O-methylnebularine, or 2'-deoxynebularine

SEQ ID NO: 3048 - RNA, 103 nt, synthetic construct; identical to SEQ ID NO: 1796
  source 1..103: mol_type = other RNA
  modified_base 1: mod_base = OTHER; note = 2'-O-Methyl-guanosine phosphorothioate
  modified_base 2: mod_base = OTHER; note = 2'-O-Methyl-adenosine phosphorothioate
  modified_base 3: mod_base = OTHER; note = 2'-O-Methyl-guanosine
  modified_base 21: mod_base = OTHER; note = 2'-O-Methyl-guanosine
  modified_base 28: mod_base = OTHER; note = 2'-O-Methyl-adenosine
  modified_base 29: mod_base = OTHER; note = 2'-O-Methyl-guanosine
  modified_base 30: mod_base = OTHER; note = 2'-O-Methyl-cytidine
  modified_base 31: mod_base = OTHER; note = 2'-O-Methyl-uridine
  modified_base 32: mod_base = OTHER; note = 2'-O-Methyl-adenosine
  modified_base 34: mod_base = OTHER; note = 2'-O-Methyl-adenosine
  modified_base 35: mod_base = OTHER; note = 2'-O-Methyl-adenosine
  modified_base 36: mod_base = OTHER; note = 2'-O-Methyl-adenosine
  modified_base 37: mod_base = OTHER; note = 2'-O-Methyl-uridine
  modified_base 38: mod_base = OTHER; note = 2'-O-Methyl-adenosine
  modified_base 39: mod_base = OTHER; note = 2'-O-Methyl-guanosine
  modified_base 40: mod_base = OTHER; note = 2'-O-Methyl-cytidine
  modified_base 41: mod_base = OTHER; note = 2'-O-Methyl-adenosine
  modified_base 42: mod_base = OTHER; note = 2'-O-Methyl-adenosine
  modified_base 45: mod_base = OTHER; note = uridine phosphorothioate
  modified_base 46: mod_base = OTHER; note = 2'-O-Methyl-adenosine
  modified_base 48: mod_base = OTHER; note = 2'-O-Methyl-adenosine
  modified_base 50: mod_base = OTHER; note = 2'-O-Methyl-uridine
  modified_base 52: mod_base = OTHER; note = 2'-O-Methyl-adenosine
  modified_base 53: mod_base = OTHER; note = 2'-O-Methyl-guanosine
  modified_base 54: mod_base = OTHER; note = 2'-O-Methyl-guanosine
  modified_base 55: mod_base = OTHER; note = 2'-O-Methyl-cytidine
  modified_base 56: mod_base = OTHER; note = 2'-O-Methyl-uridine
  modified_base 57: mod_base = OTHER; note = 2'-O-Methyl-adenosine
  modified_base 60: mod_base = OTHER; note = 2'-O-Methyl-cytidine
  modified_base 61: mod_base = OTHER; note = 2'-O-Methyl-cytidine
  modified_base 66: mod_base = OTHER; note = 2'-O-Methyl-uridine
  modified_base 67: mod_base = OTHER; note = 2'-O-Methyl-cytidine
  modified_base 70: mod_base = OTHER; note = 2'-O-Methyl-cytidine
  modified_base 71: mod_base = OTHER; note = 2'-O-Methyl-uridine
  modified_base 72: mod_base = OTHER; note = 2'-O-Methyl-uridine
  modified_base 74: mod_base = OTHER; note = 2'-O-Methyl-adenosine
  modified_base 75: mod_base = OTHER; note = 2'-O-Methyl-adenosine
  modified_base 76: mod_base = OTHER; note = 2'-O-Methyl-adenosine
  modified_base 77: mod_base = OTHER; note = 2'-O-Methyl-adenosine
  modified_base 78: mod_base = OTHER; note = 2'-O-Methyl-adenosine
  modified_base 79: mod_base = OTHER; note = 2'-O-Methyl-guanosine
  modified_base 80: mod_base = OTHER; note = 2'-O-Methyl-uridine
  modified_base 81: mod_base = OTHER; note = 2'-O-Methyl-guanosine
  modified_base 83: mod_base = OTHER; note = 2'-O-Methyl-cytidine
  modified_base 84: mod_base = OTHER; note = 2'-O-Methyl-adenosine
  modified_base 85: mod_base = OTHER; note = 2'-O-Methyl-cytidine
  modified_base 86: mod_base = OTHER; note = 2'-O-Methyl-cytidine
  modified_base 87: mod_base = OTHER; note = 2'-O-Methyl-guanosine
  modified_base 88: mod_base = OTHER; note = 2'-O-Methyl-adenosine
  modified_base 89: mod_base = OTHER; note = 2'-O-Methyl-guanosine
  modified_base 90: mod_base = OTHER; note = 2'-O-Methyl-uridine
  modified_base 91: mod_base = OTHER; note = 2'-O-Methyl-cytidine
  modified_base 92: mod_base = OTHER; note = 2'-O-Methyl-guanosine
  modified_base 93: mod_base = OTHER; note = 2'-O-Methyl-guanosine
  modified_base 94: mod_base = OTHER; note = 2'-O-Methyl-uridine
  modified_base 95: mod_base = OTHER; note = 2'-O-Methyl-guanosine
  modified_base 96: mod_base = OTHER; note = 2'-O-Methyl-cytidine
  modified_base 97: mod_base = OTHER; note = 2'-O-Methyl-uridine
  modified_base 98: mod_base = OTHER; note = 2'-O-Methyl-uridine phosphorothioate
  modified_base 99: mod_base = OTHER; note = 2'-O-Methyl-uridine phosphorothioate
  modified_base 100: mod_base = OTHER; note = 2'-O-Methyl-uridine
  misc_difference 101: note = a, c, g, inosine, u, deoxyadenosine, deoxyguanosine, deoxycytidine, deoxyinosine, thymine, ribonebularine, 2'-O-methylnebularine, or 2'-deoxynebularine
  misc_difference 102: note = a, c, g, inosine, u, deoxyadenosine, deoxyguanosine, deoxycytidine, deoxyinosine, thymine, ribonebularine, 2'-O-methylnebularine, or 2'-deoxynebularine
  misc_difference 103: note = a, c, g, inosine, u, deoxyadenosine, deoxyguanosine, deoxycytidine, deoxyinosine, thymine, ribonebularine, 2'-O-methylnebularine, or 2'-deoxynebularine

SEQ ID NO: 3049 - RNA, 103 nt, synthetic construct; identical to SEQ ID NO: 1797
  source 1..103: mol_type = other RNA
  modified_base 1: mod_base = OTHER; note = 2'-O-Methyl-cytidine phosphorothioate
  modified_base 2: mod_base = OTHER; note = 2'-O-Methyl-adenosine phosphorothioate
  modified_base 3: mod_base = OTHER; note = 2'-O-Methyl-guanosine
  modified_base 21: mod_base = OTHER; note = 2'-O-Methyl-guanosine
  modified_base 28: mod_base = OTHER; note = 2'-O-Methyl-adenosine
  modified_base 29: mod_base = OTHER; note = 2'-O-Methyl-guanosine
  modified_base 30: mod_base = OTHER; note = 2'-O-Methyl-cytidine
  modified_base 31: mod_base = OTHER; note = 2'-O-Methyl-uridine
  modified_base 32: mod_base = OTHER; note = 2'-O-Methyl-adenosine
  modified_base 33: mod_base = OTHER; note = 2'-O-Methyl-guanosine
  modified_base 34: mod_base = OTHER; note = 2'-O-Methyl-adenosine
  modified_base 35: mod_base = OTHER; note = 2'-O-Methyl-adenosine
  modified_base 36: mod_base = OTHER; note = 2'-O-Methyl-adenosine
  modified_base 37: mod_base = OTHER; note = 2'-O-Methyl-uridine
  modified_base 38: mod_base = OTHER; note = 2'-O-Methyl-adenosine
  modified_base 39: mod_base = OTHER; note = 2'-O-Methyl-guanosine
  modified_base 40: mod_base = OTHER; note = 2'-O-Methyl-cytidine
  modified_base 41: mod_base = OTHER; note = 2'-O-Methyl-adenosine
  modified_base 42: mod_base = OTHER; note = 2'-O-Methyl-adenosine
  modified_base 45: mod_base = OTHER; note = uridine phosphorothioate
  modified_base 46: mod_base = OTHER; note = 2'-O-Methyl-adenosine
  modified_base 48: mod_base = OTHER; note = 2'-O-Methyl-adenosine
  modified_base 50: mod_base = OTHER; note = 2'-O-Methyl-uridine
  modified_base 52: mod_base = OTHER; note = 2'-O-Methyl-adenosine
  modified_base 53: mod_base = OTHER; note = 2'-O-Methyl-guanosine
  modified_base 54: mod_base = OTHER; note = 2'-O-Methyl-guanosine
  modified_base 57: mod_base = OTHER; note = 2'-O-Methyl-adenosine
  modified_base 61: mod_base = OTHER; note = 2'-O-Methyl-cytidine
  modified_base 66: mod_base = OTHER; note = 2'-O-Methyl-uridine
  modified_base 67: mod_base = OTHER; note = 2'-O-Methyl-cytidine
  modified_base 70: mod_base = OTHER; note = 2'-O-Methyl-cytidine
  modified_base 71: mod_base = OTHER; note = 2'-O-Methyl-uridine
  modified_base 72: mod_base = OTHER; note = 2'-O-Methyl-uridine
  modified_base 74: mod_base = OTHER; note = 2'-O-Methyl-adenosine
  modified_base 75: mod_base = OTHER; note = 2'-O-Methyl-adenosine
  modified_base 76: mod_base = OTHER; note = 2'-O-Methyl-adenosine
  modified_base 77: mod_base = OTHER; note = 2'-O-Methyl-adenosine
  modified_base 78: mod_base = OTHER; note = 2'-O-Methyl-adenosine
  modified_base 79: mod_base = OTHER; note = 2'-O-Methyl-guanosine
  modified_base 80: mod_base = OTHER; note = 2'-O-Methyl-uridine
  modified_base 82: mod_base = OTHER; note = 2'-O-Methyl-guanosine
  modified_base 83: mod_base = OTHER; note = 2'-O-Methyl-cytidine
  modified_base 84: mod_base = OTHER; note = 2'-O-Methyl-adenosine
  modified_base 85: mod_base = OTHER; note = 2'-O-Methyl-cytidine
  modified_base 86: mod_base = OTHER; note = 2'-O-Methyl-cytidine
  modified_base 87: mod_base = OTHER; note = 2'-O-Methyl-guanosine
  modified_base 89: mod_base = OTHER; note = 2'-O-Methyl-guanosine
  modified_base 92: mod_base = OTHER; note = 2'-O-Methyl-guanosine
  modified_base 93: mod_base = OTHER; note = 2'-O-Methyl-guanosine
  modified_base 94: mod_base = OTHER; note = 2'-O-Methyl-uridine
  modified_base 95: mod_base = OTHER; note = 2'-O-Methyl-guanosine
  modified_base 96: mod_base = OTHER; note = 2'-O-Methyl-cytidine
  modified_base 97: mod_base = OTHER; note = 2'-O-Methyl-uridine
  modified_base 98: mod_base = OTHER; note = 2'-O-Methyl-uridine phosphorothioate
  modified_base 99: mod_base = OTHER; note = 2'-O-Methyl-uridine phosphorothioate
  modified_base 100: mod_base = OTHER; note = 2'-O-Methyl-uridine
  misc_difference 101: note = a, c, g, inosine, u, deoxyadenosine, deoxyguanosine, deoxycytidine, deoxyinosine, thymine, ribonebularine, 2'-O-methylnebularine, or 2'-deoxynebularine
  misc_difference 102: note = a, c, g, inosine, u, deoxyadenosine, deoxyguanosine, deoxycytidine, deoxyinosine, thymine, ribonebularine, 2'-O-methylnebularine, or 2'-deoxynebularine
  misc_difference 103: note = a, c, g, inosine, u, deoxyadenosine, deoxyguanosine, deoxycytidine, deoxyinosine, thymine, ribonebularine, 2'-O-methylnebularine, or 2'-deoxynebularine

SEQ ID NO: 3050 - RNA, 103 nt, synthetic construct; identical to SEQ ID NO: 1797
  source 1..103: mol_type = other RNA
  modified_base 1: mod_base = OTHER; note = 2'-O-Methyl-cytidine phosphorothioate
  modified_base 2: mod_base = OTHER; note = 2'-O-Methyl-adenosine phosphorothioate
  modified_base 3: mod_base = OTHER; note = 2'-O-Methyl-guanosine
  modified_base 21: mod_base = OTHER; note = 2'-O-Methyl-guanosine
  modified_base 28: mod_base = OTHER; note = 2'-O-Methyl-adenosine
  modified_base 29: mod_base = OTHER; note = 2'-O-Methyl-guanosine
  modified_base 30: mod_base = OTHER; note = 2'-O-Methyl-cytidine
  modified_base 31: mod_base = OTHER; note = 2'-O-Methyl-uridine
  modified_base 32: mod_base = OTHER; note = 2'-O-Methyl-adenosine
  modified_base 33: mod_base = OTHER; note = 2'-O-Methyl-guanosine
  modified_base 34: mod_base = OTHER; note = 2'-O-Methyl-adenosine
  modified_base 35: mod_base = OTHER; note = 2'-O-Methyl-adenosine
  modified_base 36: mod_base = OTHER; note = 2'-O-Methyl-adenosine
  modified_base 37: mod_base = OTHER; note = 2'-O-Methyl-uridine
  modified_base 38: mod_base = OTHER; note = 2'-O-Methyl-adenosine
  modified_base 39: mod_base = OTHER; note = 2'-O-Methyl-guanosine
  modified_base 40: mod_base = OTHER; note = 2'-O-Methyl-cytidine
  modified_base 41: mod_base = OTHER; note = 2'-O-Methyl-adenosine
  modified_base 42: mod_base = OTHER; note = 2'-O-Methyl-adenosine
  modified_base 45: mod_base = OTHER; note = uridine phosphorothioate
  modified_base 46: mod_base = OTHER; note = 2'-O-Methyl-adenosine
  modified_base 48: mod_base = OTHER; note = 2'-O-Methyl-adenosine
  modified_base 50: mod_base = OTHER; note = 2'-O-Methyl-uridine
  modified_base 52: mod_base = OTHER; note = 2'-O-Methyl-adenosine
  modified_base 53: mod_base = OTHER; note = 2'-O-Methyl-guanosine
  modified_base 54: mod_base = OTHER; note = 2'-O-Methyl-guanosine
  modified_base 55: mod_base = OTHER; note = 2'-O-Methyl-cytidine
  modified_base 56: mod_base = OTHER; note = 2'-O-Methyl-uridine
  modified_base 57: mod_base = OTHER; note = 2'-O-Methyl-adenosine
  modified_base 60: mod_base = OTHER; note = 2'-O-Methyl-cytidine
  modified_base 61: mod_base = OTHER; note = 2'-O-Methyl-cytidine
  modified_base 66: mod_base = OTHER; note = 2'-O-Methyl-uridine
  modified_base 67: mod_base = OTHER; note = 2'-O-Methyl-cytidine
  modified_base 70: mod_base = OTHER; note = 2'-O-Methyl-cytidine
  modified_base 71: mod_base = OTHER; note = 2'-O-Methyl-uridine
  modified_base 72: mod_base = OTHER; note = 2'-O-Methyl-uridine
  modified_base 74: mod_base = OTHER; note = 2'-O-Methyl-adenosine
  modified_base 75: mod_base = OTHER; note = 2'-O-Methyl-adenosine
  modified_base 76: mod_base = OTHER; note = 2'-O-Methyl-adenosine
  modified_base 77: mod_base = OTHER; note = 2'-O-Methyl-adenosine
  modified_base 78: mod_base = OTHER; note = 2'-O-Methyl-adenosine
  modified_base 79: mod_base = OTHER; note = 2'-O-Methyl-guanosine
  modified_base 80: mod_base = OTHER; note = 2'-O-Methyl-uridine
  modified_base 82: mod_base = OTHER; note = 2'-O-Methyl-guanosine
  modified_base 83: mod_base = OTHER; note = 2'-O-Methyl-cytidine
  modified_base 84: mod_base = OTHER; note = 2'-O-Methyl-adenosine
  modified_base 85: mod_base = OTHER; note = 2'-O-Methyl-cytidine
  modified_base 86: mod_base = OTHER; note = 2'-O-Methyl-cytidine
  modified_base 87: mod_base = OTHER; note = 2'-O-Methyl-guanosine
  modified_base 89: mod_base = OTHER; note = 2'-O-Methyl-guanosine
  modified_base 92: mod_base = OTHER; note = 2'-O-Methyl-guanosine
  modified_base 93: mod_base = OTHER; note = 2'-O-Methyl-guanosine
  modified_base 94: mod_base = OTHER; note = 2'-O-Methyl-uridine
  modified_base 95: mod_base = OTHER; note = 2'-O-Methyl-guanosine
  modified_base 96: mod_base = OTHER; note = 2'-O-Methyl-cytidine
  modified_base 97: mod_base = OTHER; note = 2'-O-Methyl-uridine
  modified_base 98: mod_base = OTHER; note = 2'-O-Methyl-uridine phosphorothioate
  modified_base 99: mod_base = OTHER; note = 2'-O-Methyl-uridine phosphorothioate
  modified_base 100: mod_base = OTHER; note = 2'-O-Methyl-uridine
  misc_difference 101: note = a, c, g, inosine, u, deoxyadenosine, deoxyguanosine, deoxycytidine, deoxyinosine, thymine, ribonebularine, 2'-O-methylnebularine, or 2'-deoxynebularine
  misc_difference 102: note = a, c, g, inosine, u, deoxyadenosine, deoxyguanosine, deoxycytidine, deoxyinosine, thymine, ribonebularine, 2'-O-methylnebularine, or 2'-deoxynebularine
  misc_difference 103: note = a, c, g, inosine, u, deoxyadenosine, deoxyguanosine, deoxycytidine, deoxyinosine, thymine, ribonebularine, 2'-O-methylnebularine, or 2'-deoxynebularine

SEQ ID NO: 3051 - RNA, 103 nt, synthetic construct; identical to SEQ ID NO: 1797
  source 1..103: mol_type = other RNA
  modified_base 1: mod_base = OTHER; note = 2'-O-Methyl-cytidine phosphorothioate
  modified_base 2: mod_base = OTHER; note = 2'-O-Methyl-adenosine phosphorothioate
  modified_base 3: mod_base = OTHER; note = 2'-O-Methyl-guanosine
  modified_base 21: mod_base = OTHER; note = 2'-O-Methyl-guanosine
  modified_base 28: mod_base = OTHER; note = 2'-O-Methyl-adenosine
  modified_base 29: mod_base = OTHER; note = 2'-O-Methyl-guanosine
  modified_base 30: mod_base = OTHER; note = 2'-O-Methyl-cytidine
  modified_base 31: mod_base = OTHER; note = 2'-O-Methyl-uridine
  modified_base 32: mod_base = OTHER; note = 2'-O-Methyl-adenosine
  modified_base 33: mod_base = OTHER; note = 2'-O-Methyl-guanosine
  modified_base 34: mod_base = OTHER; note = 2'-O-Methyl-adenosine
  modified_base 35: mod_base = OTHER; note = 2'-O-Methyl-adenosine
  modified_base 36: mod_base = OTHER; note = 2'-O-Methyl-adenosine
  modified_base 37: mod_base = OTHER; note = 2'-O-Methyl-uridine
  modified_base 38: mod_base = OTHER; note = 2'-O-Methyl-adenosine
  modified_base 39: mod_base = OTHER; note = 2'-O-Methyl-guanosine
  modified_base 40: mod_base = OTHER; note = 2'-O-Methyl-cytidine
  modified_base 41: mod_base = OTHER; note = 2'-O-Methyl-adenosine
  modified_base 42: mod_base = OTHER; note = 2'-O-Methyl-adenosine
  modified_base 45: mod_base = OTHER; note = uridine phosphorothioate
  modified_base 46: mod_base = OTHER; note = 2'-O-Methyl-adenosine
  modified_base 48: mod_base = OTHER; note = 2'-O-Methyl-adenosine
  modified_base 50: mod_base = OTHER; note = 2'-O-Methyl-uridine
  modified_base 52: mod_base = OTHER; note = 2'-O-Methyl-adenosine
  modified_base 53: mod_base = OTHER; note = 2'-O-Methyl-guanosine
  modified_base 54: mod_base = OTHER; note = 2'-O-Methyl-guanosine
  modified_base 57: mod_base = OTHER; note = 2'-O-Methyl-adenosine
  modified_base 61: mod_base = OTHER; note = 2'-O-Methyl-cytidine
  modified_base 66: mod_base = OTHER; note = 2'-O-Methyl-uridine
  modified_base 67: mod_base = OTHER; note = 2'-O-Methyl-cytidine
  modified_base 70: mod_base = OTHER; note = 2'-O-Methyl-cytidine
  modified_base 71: mod_base = OTHER; note = 2'-O-Methyl-uridine
  modified_base 72: mod_base = OTHER; note = 2'-O-Methyl-uridine
  modified_base 73: mod_base = OTHER; note = 2'-O-Methyl-guanosine
  modified_base 74: mod_base = OTHER; note = 2'-O-Methyl-adenosine
  modified_base 75: mod_base = OTHER; note = 2'-O-Methyl-adenosine
  modified_base 76: mod_base = OTHER; note = 2'-O-Methyl-adenosine
  modified_base 77: mod_base = OTHER; note = 2'-O-Methyl-adenosine
  modified_base 78: mod_base = OTHER; note = 2'-O-Methyl-adenosine
  modified_base 79: mod_base = OTHER; note = 2'-O-Methyl-guanosine
  modified_base 80: mod_base = OTHER; note = 2'-O-Methyl-uridine
  modified_base 82: mod_base = OTHER; note = 2'-O-Methyl-guanosine
  modified_base 83: mod_base = OTHER; note = 2'-O-Methyl-cytidine
  modified_base 84: mod_base = OTHER; note = 2'-O-Methyl-adenosine
  modified_base 85: mod_base = OTHER; note = 2'-O-Methyl-cytidine
  modified_base 86: mod_base = OTHER; note = 2'-O-Methyl-cytidine
  modified_base 87: mod_base = OTHER; note = 2'-O-Methyl-guanosine
  modified_base 89: mod_base = OTHER; note = 2'-O-Methyl-guanosine
  modified_base 91: mod_base = OTHER; note = 2'-O-Methyl-cytidine
  modified_base 92: mod_base = OTHER; note = 2'-O-Methyl-guanosine
  modified_base 93: mod_base = OTHER; note = 2'-O-Methyl-guanosine
  modified_base 94: mod_base = OTHER; note = 2'-O-Methyl-uridine
  modified_base 95: mod_base = OTHER; note = 2'-O-Methyl-guanosine
  modified_base 96: mod_base = OTHER; note = 2'-O-Methyl-cytidine
  modified_base 97: mod_base = OTHER; note = 2'-O-Methyl-uridine
  modified_base 98: mod_base = OTHER; note = 2'-O-Methyl-uridine phosphorothioate
  modified_base 99: mod_base = OTHER; note = 2'-O-Methyl-uridine phosphorothioate
  modified_base 100: mod_base = OTHER; note = 2'-O-Methyl-uridine
  misc_difference 101: note = a, c, g, inosine, u, deoxyadenosine, deoxyguanosine, deoxycytidine, deoxyinosine, thymine, ribonebularine, 2'-O-methylnebularine, or 2'-deoxynebularine
  misc_difference 102: note = a, c, g, inosine, u, deoxyadenosine, deoxyguanosine, deoxycytidine, deoxyinosine, thymine, ribonebularine, 2'-O-methylnebularine, or 2'-deoxynebularine
  misc_difference 103: note = a, c, g, inosine, u, deoxyadenosine, deoxyguanosine, deoxycytidine, deoxyinosine, thymine, ribonebularine, 2'-O-methylnebularine, or 2'-deoxynebularine

SEQ ID NO: 3052 - RNA, 103 nt, synthetic construct; identical to SEQ ID NO: 1797
  source 1..103: mol_type = other RNA
  modified_base 1: mod_base = OTHER; note = 2'-O-Methyl-cytidine phosphorothioate
  modified_base 2: mod_base = OTHER; note = 2'-O-Methyl-adenosine phosphorothioate
  modified_base 3: mod_base = OTHER; note = 2'-O-Methyl-guanosine
  modified_base 21: mod_base = OTHER; note = 2'-O-Methyl-guanosine
  modified_base 28: mod_base = OTHER; note = 2'-O-Methyl-adenosine
  modified_base 29: mod_base = OTHER; note = 2'-O-Methyl-guanosine
  modified_base 30: mod_base = OTHER; note = 2'-O-Methyl-cytidine
  modified_base 31: mod_base = OTHER; note = 2'-O-Methyl-uridine
  modified_base 32: mod_base = OTHER; note = 2'-O-Methyl-adenosine
  modified_base 34: mod_base = OTHER; note = 2'-O-Methyl-adenosine
  modified_base 35: mod_base = OTHER; note = 2'-O-Methyl-adenosine
  modified_base 36: mod_base = OTHER; note = 2'-O-Methyl-adenosine
  modified_base 37: mod_base = OTHER; note = 2'-O-Methyl-uridine
  modified_base 38: mod_base = OTHER; note = 2'-O-Methyl-adenosine
  modified_base 39: mod_base = OTHER; note = 2'-O-Methyl-guanosine
  modified_base 40: mod_base = OTHER; note = 2'-O-Methyl-cytidine
  modified_base 41: mod_base = OTHER; note = 2'-O-Methyl-adenosine
  modified_base 42: mod_base = OTHER; note = 2'-O-Methyl-adenosine
  modified_base 45: mod_base = OTHER; note = uridine phosphorothioate
  modified_base 46: mod_base = OTHER; note = 2'-O-Methyl-adenosine
  modified_base 48: mod_base = OTHER; note = 2'-O-Methyl-adenosine
  modified_base 50: mod_base = OTHER; note = 2'-O-Methyl-uridine
  modified_base 52: mod_base = OTHER; note = 2'-O-Methyl-adenosine
  modified_base 53: mod_base = OTHER; note = 2'-O-Methyl-guanosine
  modified_base 54: mod_base = OTHER; note = 2'-O-Methyl-guanosine
  modified_base 57: mod_base = OTHER; note = 2'-O-Methyl-adenosine
  modified_base 61: mod_base = OTHER; note = 2'-O-Methyl-cytidine
  modified_base 66: mod_base = OTHER; note = 2'-O-Methyl-uridine
  modified_base 67: mod_base = OTHER; note = 2'-O-Methyl-cytidine
  modified_base 70: mod_base = OTHER; note = 2'-O-Methyl-cytidine
  modified_base 71: mod_base = OTHER; note = 2'-O-Methyl-uridine
  modified_base 72: mod_base = OTHER; note = 2'-O-Methyl-uridine
  modified_base 73: mod_base = OTHER; note = 2'-O-Methyl-guanosine
  modified_base 74: mod_base = OTHER; note = 2'-O-Methyl-adenosine
  modified_base 75: mod_base = OTHER; note = 2'-O-Methyl-adenosine
  modified_base 76: mod_base = OTHER; note = 2'-O-Methyl-adenosine
  modified_base 77: mod_base = OTHER; note = 2'-O-Methyl-adenosine
  modified_base 78: mod_base = OTHER; note = 2'-O-Methyl-adenosine
  modified_base 79: mod_base = OTHER; note = 2'-O-Methyl-guanosine
  modified_base 80: mod_base = OTHER; note = 2'-O-Methyl-uridine
  modified_base 82: mod_base = OTHER; note = 2'-O-Methyl-guanosine
  modified_base 83: mod_base = OTHER; note = 2'-O-Methyl-cytidine
  modified_base 84: mod_base = OTHER; note = 2'-O-Methyl-adenosine
  modified_base 85: mod_base = OTHER; note = 2'-O-Methyl-cytidine
  modified_base 86: mod_base = OTHER; note = 2'-O-Methyl-cytidine
  modified_base 87: mod_base = OTHER; note = 2'-O-Methyl-guanosine
  modified_base 89: mod_base = OTHER; note = 2'-O-Methyl-guanosine
  modified_base 92: mod_base = OTHER; note = 2'-O-Methyl-guanosine
  modified_base 93: mod_base = OTHER; note = 2'-O-Methyl-guanosine
  modified_base 94: mod_base = OTHER; note = 2'-O-Methyl-uridine
  modified_base 95: mod_base = OTHER; note = 2'-O-Methyl-guanosine
  modified_base 96: mod_base = OTHER; note = 2'-O-Methyl-cytidine
  modified_base 97: mod_base = OTHER; note = 2'-O-Methyl-uridine
  modified_base 98: mod_base = OTHER; note = 2'-O-Methyl-uridine phosphorothioate
  modified_base 99: mod_base = OTHER; note = 2'-O-Methyl-uridine phosphorothioate
  modified_base 100: mod_base = OTHER; note = 2'-O-Methyl-uridine
  misc_difference 101: note = a, c, g, inosine, u, deoxyadenosine, deoxyguanosine, deoxycytidine, deoxyinosine, thymine, ribonebularine, 2'-O-methylnebularine, or 2'-deoxynebularine
  misc_difference 102: note = a, c, g, inosine, u, deoxyadenosine, deoxyguanosine, deoxycytidine, deoxyinosine, thymine, ribonebularine, 2'-O-methylnebularine, or 2'-deoxynebularine
  misc_difference 103: note = a, c, g, inosine, u, deoxyadenosine, deoxyguanosine, deoxycytidine, deoxyinosine, thymine, ribonebularine, 2'-O-methylnebularine, or 2'-deoxynebularine

SEQ ID NO: 3053 - RNA, 103 nt, synthetic construct; identical to SEQ ID NO: 1797
  source 1..103: mol_type = other RNA
  modified_base 1: mod_base = OTHER; note = 2'-O-Methyl-cytidine phosphorothioate
  modified_base 2: mod_base = OTHER; note = 2'-O-Methyl-adenosine phosphorothioate
  modified_base 3: mod_base = OTHER; note = 2'-O-Methyl-guanosine
  modified_base 21: mod_base = OTHER; note = 2'-O-Methyl-guanosine
  modified_base 28: mod_base = OTHER; note = 2'-O-Methyl-adenosine
  modified_base 29: mod_base = OTHER; note = 2'-O-Methyl-guanosine
  modified_base 30: mod_base = OTHER; note = 2'-O-Methyl-cytidine
  modified_base 31: mod_base = OTHER; note = 2'-O-Methyl-uridine
  modified_base 32: mod_base = OTHER; note = 2'-O-Methyl-adenosine
  modified_base 34: mod_base = OTHER; note = 2'-O-Methyl-adenosine
  modified_base 35: mod_base = OTHER; note = 2'-O-Methyl-adenosine
  modified_base 36: mod_base = OTHER; note = 2'-O-Methyl-adenosine
  modified_base 37: mod_base = OTHER; note = 2'-O-Methyl-uridine
  modified_base 38: mod_base = OTHER; note = 2'-O-Methyl-adenosine
  modified_base 39: mod_base = OTHER; note = 2'-O-Methyl-guanosine
  modified_base 40: mod_base = OTHER; note = 2'-O-Methyl-cytidine
  modified_base 41: mod_base = OTHER; note = 2'-O-Methyl-adenosine
  modified_base 42: mod_base = OTHER; note = 2'-O-Methyl-adenosine
  modified_base 45: mod_base = OTHER; note = uridine phosphorothioate
  modified_base 46: mod_base = OTHER; note = 2'-O-Methyl-adenosine
  modified_base 48: mod_base = OTHER; note = 2'-O-Methyl-adenosine
  modified_base 50: mod_base = OTHER; note = 2'-O-Methyl-uridine
  modified_base 52: mod_base = OTHER; note = 2'-O-Methyl-adenosine
  modified_base 53: mod_base = OTHER; note = 2'-O-Methyl-guanosine
  modified_base 54: mod_base = OTHER; note = 2'-O-Methyl-guanosine
  modified_base 57: mod_base = OTHER; note = 2'-O-Methyl-adenosine
  modified_base 61: mod_base = OTHER; note = 2'-O-Methyl-cytidine
  modified_base 66: mod_base = OTHER; note = 2'-O-Methyl-uridine
  modified_base 67: mod_base = OTHER; note = 2'-O-Methyl-cytidine
  modified_base 70: mod_base = OTHER; note = 2'-O-Methyl-cytidine
  modified_base 71: mod_base = OTHER; note = 2'-O-Methyl-uridine
  modified_base 72: mod_base = OTHER; note = 2'-O-Methyl-uridine
  modified_base 73: mod_base = OTHER; note = 2'-O-Methyl-guanosine
  modified_base 74: mod_base = OTHER; note = 2'-O-Methyl-adenosine
  modified_base 75: mod_base = OTHER; note = 2'-O-Methyl-adenosine
  modified_base 76: mod_base = OTHER; note = 2'-O-Methyl-adenosine
  modified_base 77: mod_base = OTHER; note = 2'-O-Methyl-adenosine
  modified_base 78: mod_base = OTHER; note = 2'-O-Methyl-adenosine
  modified_base 79: mod_base = OTHER; note = 2'-O-Methyl-guanosine
  modified_base 80: mod_base = OTHER; note = 2'-O-Methyl-uridine
  modified_base 82: mod_base = OTHER; note = 2'-O-Methyl-guanosine
  modified_base 83: mod_base = OTHER; note = 2'-O-Methyl-cytidine
  modified_base 84: mod_base = OTHER; note = 2'-O-Methyl-adenosine
  modified_base 85: mod_base = OTHER; note = 2'-O-Methyl-cytidine
  modified_base 86: mod_base = OTHER; note = 2'-O-Methyl-cytidine
  modified_base 87: mod_base = OTHER; note = 2'-O-Methyl-guanosine
  modified_base 89: mod_base = OTHER; note = 2'-O-Methyl-guanosine
  modified_base 91: mod_base = OTHER; note = 2'-O-Methyl-cytidine
  modified_base 92: mod_base = OTHER; note = 2'-O-Methyl-guanosine
  modified_base 93: mod_base = OTHER; note = 2'-O-Methyl-guanosine
  modified_base 94: mod_base = OTHER; note = 2'-O-Methyl-uridine
  modified_base 95: mod_base = OTHER; note = 2'-O-Methyl-guanosine
  modified_base 96: mod_base = OTHER; note = 2'-O-Methyl-cytidine
  modified_base 97: mod_base = OTHER; note = 2'-O-Methyl-uridine
  modified_base 98: mod_base = OTHER; note = 2'-O-Methyl-uridine phosphorothioate
  modified_base 99: mod_base = OTHER; note = 2'-O-Methyl-uridine phosphorothioate
  modified_base 100: mod_base = OTHER; note = 2'-O-Methyl-uridine
  misc_difference 101: note = a, c, g, inosine, u, deoxyadenosine, deoxyguanosine, deoxycytidine, deoxyinosine, thymine, ribonebularine, 2'-O-methylnebularine, or 2'-deoxynebularine
  misc_difference 102: note = a, c, g, inosine, u, deoxyadenosine, deoxyguanosine, deoxycytidine, deoxyinosine, thymine, ribonebularine, 2'-O-methylnebularine, or 2'-deoxynebularine
  misc_difference 103: note = a, c, g, inosine, u, deoxyadenosine, deoxyguanosine, deoxycytidine, deoxyinosine, thymine, ribonebularine, 2'-O-methylnebularine, or 2'-deoxynebularine

SEQ ID NO: 3054 - RNA, 103 nt, synthetic construct; identical to SEQ ID NO: 1797
  source 1..103: mol_type = other RNA
  modified_base 1: mod_base = OTHER; note = 2'-O-Methyl-cytidine phosphorothioate
  modified_base 2: mod_base = OTHER; note = 2'-O-Methyl-adenosine phosphorothioate
  modified_base 3: mod_base = OTHER; note = 2'-O-Methyl-guanosine
  modified_base 21: mod_base = OTHER; note = 2'-O-Methyl-guanosine
  modified_base 28: mod_base = OTHER; note = 2'-O-Methyl-adenosine
  modified_base 29: mod_base = OTHER; note = 2'-O-Methyl-guanosine
  modified_base 30: mod_base = OTHER; note = 2'-O-Methyl-cytidine
  modified_base 31: mod_base = OTHER; note = 2'-O-Methyl-uridine
  modified_base 32: mod_base = OTHER; note = 2'-O-Methyl-adenosine
  modified_base 34: mod_base = OTHER; note = 2'-O-Methyl-adenosine
  modified_base 35: mod_base = OTHER; note = 2'-O-Methyl-adenosine
  modified_base 36: mod_base = OTHER; note = 2'-O-Methyl-adenosine
  modified_base 37: mod_base = OTHER; note = 2'-O-Methyl-uridine
  modified_base 38: mod_base = OTHER; note = 2'-O-Methyl-adenosine
  modified_base 39: mod_base = OTHER; note = 2'-O-Methyl-guanosine
  modified_base 40: mod_base = OTHER; note = 2'-O-Methyl-cytidine
  modified_base 41: mod_base = OTHER; note = 2'-O-Methyl-adenosine
  modified_base 42: mod_base = OTHER; note = 2'-O-Methyl-adenosine
  modified_base 45: mod_base = OTHER; note = uridine phosphorothioate
  modified_base 46: mod_base = OTHER; note = 2'-O-Methyl-adenosine
  modified_base 48: mod_base = OTHER; note = 2'-O-Methyl-adenosine
  modified_base 50: mod_base = OTHER; note = 2'-O-Methyl-uridine
  modified_base 52: mod_base = OTHER; note = 2'-O-Methyl-adenosine
  modified_base 53: mod_base = OTHER; note = 2'-O-Methyl-guanosine
  modified_base 54: mod_base = OTHER; note = 2'-O-Methyl-guanosine
  modified_base 55: mod_base = OTHER; note = 2'-O-Methyl-cytidine
  modified_base 56: mod_base = OTHER; note = 2'-O-Methyl-uridine
  modified_base 57: mod_base = OTHER; note = 2'-O-Methyl-adenosine
  modified_base 60: mod_base = OTHER; note = 2'-O-Methyl-cytidine
  modified_base 61: mod_base = OTHER; note = 2'-O-Methyl-cytidine
  modified_base 66: mod_base = OTHER; note = 2'-O-Methyl-uridine
  modified_base 67: mod_base = OTHER; note = 2'-O-Methyl-cytidine
  modified_base 70: mod_base = OTHER; note = 2'-O-Methyl-cytidine
  modified_base 71: mod_base = OTHER; note = 2'-O-Methyl-uridine
  modified_base 72: mod_base = OTHER; note = 2'-O-Methyl-uridine
  modified_base 74: mod_base = OTHER; note = 2'-O-Methyl-adenosine
  modified_base 75: mod_base = OTHER; note = 2'-O-Methyl-adenosine
  modified_base 76: mod_base = OTHER; note = 2'-O-Methyl-adenosine
  modified_base 77: mod_base = OTHER; note = 2'-O-Methyl-adenosine
  modified_base 78: mod_base = OTHER; note = 2'-O-Methyl-adenosine
  modified_base 79: mod_base = OTHER; note = 2'-O-Methyl-guanosine
  modified_base 80: mod_base = OTHER; note = 2'-O-Methyl-uridine
  modified_base 82: mod_base = OTHER; note = 2'-O-Methyl-guanosine
  modified_base 83: mod_base = OTHER; note = 2'-O-Methyl-cytidine
  modified_base 84: mod_base = OTHER; note = 2'-O-Methyl-adenosine
  modified_base 85: mod_base = OTHER; note = 2'-O-Methyl-cytidine
  modified_base 86: mod_base = OTHER; note = 2'-O-Methyl-cytidine
  modified_base 87: mod_base = OTHER; note = 2'-O-Methyl-guanosine
  modified_base 89: mod_base = OTHER; note = 2'-O-Methyl-guanosine
  modified_base 92: mod_base = OTHER; note = 2'-O-Methyl-guanosine
  modified_base 93: mod_base = OTHER; note = 2'-O-Methyl-guanosine
  modified_base 94: mod_base = OTHER; note = 2'-O-Methyl-uridine
  modified_base 95: mod_base = OTHER; note = 2'-O-Methyl-guanosine
  modified_base 96: mod_base = OTHER; note = 2'-O-Methyl-cytidine
  modified_base 97: mod_base = OTHER; note = 2'-O-Methyl-uridine
  modified_base 98: mod_base = OTHER; note = 2'-O-Methyl-uridine phosphorothioate
  modified_base 99: mod_base = OTHER; note = 2'-O-Methyl-uridine phosphorothioate
  modified_base 100: mod_base = OTHER; note = 2'-O-Methyl-uridine
  misc_difference 101: note = a, c, g, inosine, u, deoxyadenosine, deoxyguanosine, deoxycytidine, deoxyinosine, thymine, ribonebularine, 2'-O-methylnebularine, or 2'-deoxynebularine
  misc_difference 102: note = a, c, g, inosine, u, deoxyadenosine, deoxyguanosine, deoxycytidine, deoxyinosine, thymine, ribonebularine, 2'-O-methylnebularine, or 2'-deoxynebularine
  misc_difference 103: note = a, c, g, inosine, u, deoxyadenosine, deoxyguanosine, deoxycytidine, deoxyinosine, thymine, ribonebularine, 2'-O-methylnebularine, or 2'-deoxynebularine

SEQ ID NO: 3055 - RNA, 103 nt, synthetic construct; identical to SEQ ID NO: 1795
  source 1..103: mol_type = other RNA
  modified_base 1: mod_base = OTHER; note = 2'-O-Methyl-cytidine phosphorothioate
  modified_base 2: mod_base = OTHER; note = 2'-O-Methyl-cytidine phosphorothioate
  modified_base 3: mod_base = OTHER; note = 2'-O-Methyl-cytidine
  modified_base 21: mod_base = OTHER; note = 2'-O-Methyl-guanosine
  modified_base 25: mod_base = OTHER; note = uridine phosphorothioate
  modified_base 28: mod_base = OTHER; note = 2'-O-Methyl-adenosine
  modified_base 29: mod_base = OTHER; note = 2'-O-Methyl-guanosine
  modified_base 30: mod_base = OTHER; note = 2'-O-Methyl-cytidine
  modified_base 31: mod_base = OTHER; note = 2'-O-Methyl-uridine
  modified_base 32: mod_base = OTHER; note = 2'-O-Methyl-adenosine
  modified_base 33: mod_base = OTHER; note = 2'-O-Methyl-guanosine
  modified_base 34: mod_base = OTHER; note = 2'-O-Methyl-adenosine
  modified_base 35: mod_base = OTHER; note = 2'-O-Methyl-adenosine
  modified_base 36: mod_base = OTHER; note = 2'-O-Methyl-adenosine
  modified_base 37: mod_base = OTHER; note = 2'-O-Methyl-uridine
  modified_base 38: mod_base = OTHER; note = 2'-O-Methyl-adenosine
  modified_base 39: mod_base = OTHER; note = 2'-O-Methyl-guanosine
  modified_base 40: mod_base = OTHER; note = 2'-O-Methyl-cytidine
  modified_base 41: mod_base = OTHER; note = 2'-O-Methyl-adenosine
  modified_base 42: mod_base = OTHER; note = 2'-O-Methyl-adenosine
  modified_base 46: mod_base = OTHER; note = 2'-O-Methyl-adenosine
  modified_base 48: mod_base = OTHER; note = 2'-O-Methyl-adenosine
  modified_base 50: mod_base = OTHER; note = 2'-O-Methyl-uridine
  modified_base 52: mod_base = OTHER; note = 2'-O-Methyl-adenosine
  modified_base 53: mod_base = OTHER; note = 2'-O-Methyl-guanosine
  modified_base 54: mod_base = OTHER; note = 2'-O-Methyl-guanosine
  modified_base 55: mod_base = OTHER; note = 2'-O-Methyl-cytidine
  modified_base 56: mod_base = OTHER; note = 2'-O-Methyl-uridine
  modified_base 57: mod_base = OTHER; note = 2'-O-Methyl-adenosine
  modified_base 60: mod_base = OTHER; note = 2'-O-Methyl-cytidine
  modified_base 61: mod_base = OTHER; note = 2'-O-Methyl-cytidine
  modified_base 66: mod_base = OTHER; note = 2'-O-Methyl-uridine
  modified_base 67: mod_base = OTHER; note = 2'-O-Methyl-cytidine
  modified_base 70: mod_base = OTHER; note = 2'-O-Methyl-cytidine
  modified_base 71: mod_base = OTHER; note = 2'-O-Methyl-uridine
  modified_base 72: mod_base = OTHER; note = 2'-O-Methyl-uridine
  modified_base 73: mod_base = OTHER; note = 2'-O-Methyl-guanosine
  modified_base 74: mod_base = OTHER; note = 2'-O-Methyl-adenosine
  modified_base 75: mod_base = OTHER; note = 2'-O-Methyl-adenosine
  modified_base 76: mod_base = OTHER; note = 2'-O-Methyl-adenosine
  modified_base 77: mod_base = OTHER; note = 2'-O-Methyl-adenosine
  modified_base 78: mod_base = OTHER; note = 2'-O-Methyl-adenosine
  modified_base 79: mod_base = OTHER; note = 2'-O-Methyl-guanosine
  modified_base 80: mod_base = OTHER; note = 2'-O-Methyl-uridine
  modified_base 81: mod_base = OTHER; note = 2'-O-Methyl-guanosine
  modified_base 83: mod_base = OTHER; note = 2'-O-Methyl-cytidine
  modified_base 84: mod_base = OTHER; note = 2'-O-Methyl-adenosine
  modified_base 85: mod_base = OTHER; note = 2'-O-Methyl-cytidine
  modified_base 86: mod_base = OTHER; note = 2'-O-Methyl-cytidine
  modified_base 87: mod_base = OTHER; note = 2'-O-Methyl-guanosine
  modified_base 88: mod_base = OTHER; note = 2'-O-Methyl-adenosine
  modified_base 89: mod_base = OTHER; note = 2'-O-Methyl-guanosine
  modified_base 90: mod_base = OTHER; note = 2'-O-Methyl-uridine
  modified_base 91: mod_base = OTHER; note = 2'-O-Methyl-cytidine
  modified_base 92: mod_base = OTHER; note = 2'-O-Methyl-guanosine
  modified_base 93: mod_base = OTHER; note = 2'-O-Methyl-guanosine
  modified_base 94: mod_base = OTHER; note = 2'-O-Methyl-uridine
  modified_base 95: mod_base = OTHER; note = 2'-O-Methyl-guanosine
  modified_base 96: mod_base = OTHER; note = 2'-O-Methyl-cytidine
  modified_base 97: mod_base = OTHER; note = 2'-O-Methyl-uridine
  modified_base 98: mod_base = OTHER; note = 2'-O-Methyl-uridine phosphorothioate
  modified_base 99: mod_base = OTHER; note = 2'-O-Methyl-uridine phosphorothioate
  modified_base 100: mod_base = OTHER; note = 2'-O-Methyl-uridine
  misc_difference 101: note = a, c, g, inosine, u, deoxyadenosine, deoxyguanosine, deoxycytidine, deoxyinosine, thymine, ribonebularine, 2'-O-methylnebularine, or 2'-deoxynebularine
  misc_difference 102: note = a, c, g, inosine, u, deoxyadenosine, deoxyguanosine, deoxycytidine, deoxyinosine, thymine, ribonebularine, 2'-O-methylnebularine, or 2'-deoxynebularine
  misc_difference 103: note = a, c, g, inosine, u, deoxyadenosine, deoxyguanosine, deoxycytidine, deoxyinosine, thymine, ribonebularine, 2'-O-methylnebularine, or 2'-deoxynebularine

SEQ ID NO: 3056 - RNA, 103 nt, synthetic construct; identical to SEQ ID NO: 1795
  source 1..103: mol_type = other RNA
  modified_base 1: mod_base = OTHER; note = 2'-O-Methyl-cytidine phosphorothioate
  modified_base 2: mod_base = OTHER; note = 2'-O-Methyl-cytidine phosphorothioate
  modified_base 3: mod_base = OTHER; note = 2'-O-Methyl-cytidine
  modified_base 21: mod_base = OTHER; note = 2'-O-Methyl-guanosine
  modified_base 25: mod_base = OTHER; note = uridine phosphorothioate
  modified_base 28: mod_base = OTHER; note = 2'-O-Methyl-adenosine
  modified_base 29: mod_base = OTHER; note = 2'-O-Methyl-guanosine
  modified_base 30: mod_base = OTHER; note = 2'-O-Methyl-cytidine
  modified_base 31: mod_base = OTHER; note = 2'-O-Methyl-uridine
  modified_base 32: mod_base = OTHER; note = 2'-O-Methyl-adenosine
  modified_base 34: mod_base = OTHER; note = 2'-O-Methyl-adenosine
  modified_base 35: mod_base = OTHER; note = 2'-O-Methyl-adenosine
  modified_base 36: mod_base = OTHER; note = 2'-O-Methyl-adenosine
  modified_base 37: mod_base = OTHER; note = 2'-O-Methyl-uridine
  modified_base 38: mod_base = OTHER; note = 2'-O-Methyl-adenosine
  modified_base 39: mod_base = OTHER; note = 2'-O-Methyl-guanosine
  modified_base 40: mod_base = OTHER; note = 2'-O-Methyl-cytidine
  modified_base 41: mod_base = OTHER; note = 2'-O-Methyl-adenosine
  modified_base 42: mod_base = OTHER; note = 2'-O-Methyl-adenosine
  modified_base 46: mod_base = OTHER; note = 2'-O-Methyl-adenosine
  modified_base 48: mod_base = OTHER; note = 2'-O-Methyl-adenosine
  modified_base 50: mod_base = OTHER; note = 2'-O-Methyl-uridine
  modified_base 52: mod_base = OTHER; note = 2'-O-Methyl-adenosine
  modified_base 53: mod_base = OTHER; note = 2'-O-Methyl-guanosine
  modified_base 54: mod_base = OTHER; note = 2'-O-Methyl-guanosine
  modified_base 55: mod_base = OTHER; note = 2'-O-Methyl-cytidine
  modified_base 56: mod_base = OTHER; note = 2'-O-Methyl-uridine
  modified_base 57: mod_base = OTHER; note = 2'-O-Methyl-adenosine
  modified_base 60: mod_base = OTHER; note = 2'-O-Methyl-cytidine
  modified_base 61: mod_base = OTHER; note = 2'-O-Methyl-cytidine
  modified_base 66: mod_base = OTHER; note = 2'-O-Methyl-uridine
  modified_base 67: mod_base = OTHER; note = 2'-O-Methyl-cytidine
  modified_base 70: mod_base = OTHER; note = 2'-O-Methyl-cytidine
  modified_base 71: mod_base = OTHER; note = 2'-O-Methyl-uridine
  modified_base 72: mod_base = OTHER; note = 2'-O-Methyl-uridine
  modified_base 74: mod_base = OTHER; note = 2'-O-Methyl-adenosine
  modified_base 75: mod_base = OTHER; note = 2'-O-Methyl-adenosine
  modified_base 76: mod_base = OTHER; note = 2'-O-Methyl-adenosine
  modified_base 77: mod_base = OTHER; note = 2'-O-Methyl-adenosine
  modified_base 78: mod_base = OTHER; note = 2'-O-Methyl-adenosine
  modified_base 79: mod_base = OTHER; note = 2'-O-Methyl-guanosine
  modified_base 80: mod_base = OTHER; note = 2'-O-Methyl-uridine
  modified_base 81: mod_base = OTHER; note = 2'-O-Methyl-guanosine
  modified_base 83: mod_base = OTHER; note = 2'-O-Methyl-cytidine
  modified_base 84: mod_base = OTHER; note = 2'-O-Methyl-adenosine
  modified_base 85: mod_base = OTHER; note = 2'-O-Methyl-cytidine
  modified_base 86: mod_base = OTHER; note = 2'-O-Methyl-cytidine
  modified_base 87: mod_base = OTHER; note = 2'-O-Methyl-guanosine
  modified_base 88: mod_base = OTHER; note = 2'-O-Methyl-adenosine
  modified_base 89: mod_base = OTHER; note = 2'-O-Methyl-guanosine
  modified_base 90: mod_base = OTHER; note = 2'-O-Methyl-uridine
  modified_base 91: mod_base = OTHER; note = 2'-O-Methyl-cytidine
  modified_base 92: mod_base = OTHER; note = 2'-O-Methyl-guanosine
  modified_base 93: mod_base = OTHER; note = 2'-O-Methyl-guanosine
  modified_base 94: mod_base = OTHER; note = 2'-O-Methyl-uridine
  modified_base 95: mod_base = OTHER; note = 2'-O-Methyl-guanosine
  modified_base 96: mod_base = OTHER; note = 2'-O-Methyl-cytidine
  modified_base 97: mod_base = OTHER; note = 2'-O-Methyl-uridine
  modified_base 98: mod_base = OTHER; note = 2'-O-Methyl-uridine phosphorothioate
  modified_base 99: mod_base = OTHER; note = 2'-O-Methyl-uridine phosphorothioate
  modified_base 100: mod_base = OTHER; note = 2'-O-Methyl-uridine
  misc_difference 101: note = a, c, g, inosine, u, deoxyadenosine, deoxyguanosine, deoxycytidine, deoxyinosine, thymine, ribonebularine, 2'-O-methylnebularine, or 2'-deoxynebularine
  misc_difference 102: note = a, c, g, inosine, u, deoxyadenosine, deoxyguanosine, deoxycytidine, deoxyinosine, thymine, ribonebularine, 2'-O-methylnebularine, or 2'-deoxynebularine
  misc_difference 103: note = a, c, g, inosine, u, deoxyadenosine, deoxyguanosine, deoxycytidine, deoxyinosine, thymine, ribonebularine, 2'-O-methylnebularine, or 2'-deoxynebularine

SEQ ID NO: 3057 - RNA, 103 nt, synthetic construct; identical to SEQ ID NO: 1796
  source 1..103: mol_type = other RNA
  modified_base 1: mod_base = OTHER; note = 2'-O-Methyl-guanosine phosphorothioate
  modified_base 2: mod_base = OTHER; note = 2'-O-Methyl-adenosine phosphorothioate
  modified_base 3: mod_base = OTHER; note = 2'-O-Methyl-guanosine
  modified_base 21: mod_base = OTHER; note = 2'-O-Methyl-guanosine
  modified_base 25: mod_base = OTHER; note = uridine phosphorothioate
  modified_base 28: mod_base = OTHER; note = 2'-O-Methyl-adenosine
  modified_base 29: mod_base = OTHER; note = 2'-O-Methyl-guanosine
  modified_base 30: mod_base = OTHER; note = 2'-O-Methyl-cytidine
  modified_base 31: mod_base = OTHER; note = 2'-O-Methyl-uridine
  modified_base 32: mod_base = OTHER; note = 2'-O-Methyl-adenosine
  modified_base 33: mod_base = OTHER; note = 2'-O-Methyl-guanosine
  modified_base 34: mod_base = OTHER; note = 2'-O-Methyl-adenosine
  modified_base 35: mod_base = OTHER; note = 2'-O-Methyl-adenosine
  modified_base 36: mod_base = OTHER; note = 2'-O-Methyl-adenosine
  modified_base 37: mod_base = OTHER; note = 2'-O-Methyl-uridine
  modified_base 38: mod_base = OTHER; note = 2'-O-Methyl-adenosine
  modified_base 39: mod_base = OTHER; note = 2'-O-Methyl-guanosine
  modified_base 40: mod_base = OTHER; note = 2'-O-Methyl-cytidine
  modified_base 41: mod_base = OTHER; note = 2'-O-Methyl-adenosine
  modified_base 42: mod_base = OTHER; note = 2'-O-Methyl-adenosine
  modified_base 46: mod_base = OTHER; note = 2'-O-Methyl-adenosine
  modified_base 48: mod_base = OTHER; note = 2'-O-Methyl-adenosine
  modified_base 50: mod_base = OTHER; note = 2'-O-Methyl-uridine
  modified_base 52: mod_base = OTHER; note = 2'-O-Methyl-adenosine
  modified_base 53: mod_base = OTHER; note = 2'-O-Methyl-guanosine
  modified_base 54: mod_base = OTHER; note = 2'-O-Methyl-guanosine
  modified_base 55: mod_base = OTHER; note = 2'-O-Methyl-cytidine
  modified_base 56: mod_base = OTHER; note = 2'-O-Methyl-uridine
  modified_base 57: mod_base = OTHER; note = 2'-O-Methyl-adenosine
  modified_base 60: mod_base = OTHER; note = 2'-O-Methyl-cytidine
  modified_base 61: mod_base = OTHER; note = 2'-O-Methyl-cytidine
  modified_base 66: mod_base = OTHER; note = 2'-O-Methyl-uridine
  modified_base 67: mod_base = OTHER; note = 2'-O-Methyl-cytidine
  modified_base 70: mod_base = OTHER; note = 2'-O-Methyl-cytidine
  modified_base 71: mod_base = OTHER; note = 2'-O-Methyl-uridine
  modified_base 72: mod_base = OTHER; note = 2'-O-Methyl-uridine
  modified_base 73: mod_base = OTHER; note = 2'-O-Methyl-guanosine
  modified_base 74: mod_base = OTHER; note = 2'-O-Methyl-adenosine
  modified_base 75: mod_base = OTHER; note = 2'-O-Methyl-adenosine
  modified_base 76: mod_base = OTHER; note = 2'-O-Methyl-adenosine
  modified_base 77: mod_base = OTHER; note = 2'-O-Methyl-adenosine
  modified_base 78: mod_base = OTHER; note = 2'-O-Methyl-adenosine
  modified_base 79: mod_base = OTHER; note = 2'-O-Methyl-guanosine
  modified_base 80: mod_base = OTHER; note = 2'-O-Methyl-uridine
  modified_base 81: mod_base = OTHER; note = 2'-O-Methyl-guanosine
  modified_base 83: mod_base = OTHER; note = 2'-O-Methyl-cytidine
  modified_base 84: mod_base = OTHER; note = 2'-O-Methyl-adenosine
  modified_base 85: mod_base = OTHER; note = 2'-O-Methyl-cytidine
  modified_base 86: mod_base = OTHER; note = 2'-O-Methyl-cytidine
  modified_base 87: mod_base = OTHER; note = 2'-O-Methyl-guanosine
  modified_base 88: mod_base = OTHER; note = 2'-O-Methyl-adenosine
  modified_base 89: mod_base = OTHER; note = 2'-O-Methyl-guanosine
  modified_base 90: mod_base = OTHER; note = 2'-O-Methyl-uridine
  modified_base 91: mod_base = OTHER; note = 2'-O-Methyl-cytidine
  modified_base 92: mod_base = OTHER; note = 2'-O-Methyl-guanosine
  modified_base 93: mod_base = OTHER; note = 2'-O-Methyl-guanosine
  modified_base 94: mod_base = OTHER; note = 2'-O-Methyl-uridine
  modified_base 95: mod_base = OTHER; note = 2'-O-Methyl-guanosine
  modified_base 96: mod_base = OTHER; note = 2'-O-Methyl-cytidine
  modified_base 97: mod_base = OTHER; note = 2'-O-Methyl-uridine
  modified_base 98: mod_base = OTHER; note = 2'-O-Methyl-uridine phosphorothioate
  modified_base 99: mod_base = OTHER; note = 2'-O-Methyl-uridine phosphorothioate
  modified_base 100: mod_base = OTHER; note = 2'-O-Methyl-uridine
  misc_difference 101: note = a, c, g, inosine, u, deoxyadenosine, deoxyguanosine, deoxycytidine, deoxyinosine, thymine, ribonebularine, 2'-O-methylnebularine, or 2'-deoxynebularine
  misc_difference 102: note = a, c, g, inosine, u, deoxyadenosine, deoxyguanosine, deoxycytidine, deoxyinosine, thymine, ribonebularine, 2'-O-methylnebularine, or 2'-deoxynebularine
  misc_difference 103: note = a, c, g, inosine, u, deoxyadenosine, deoxyguanosine, deoxycytidine, deoxyinosine, thymine, ribonebularine, 2'-O-methylnebularine, or 2'-deoxynebularine

SEQ ID NO: 3058 - RNA, 103 nt, synthetic construct; identical to SEQ ID NO: 1796
  source 1..103: mol_type = other RNA
  modified_base 1: mod_base = OTHER; note = 2'-O-Methyl-guanosine phosphorothioate
  modified_base 2: mod_base = OTHER; note = 2'-O-Methyl-adenosine phosphorothioate
  modified_base 3: mod_base = OTHER; note = 2'-O-Methyl-guanosine
  modified_base 21: mod_base = OTHER; note = 2'-O-Methyl-guanosine
  modified_base 25: mod_base = OTHER; note = uridine phosphorothioate
  modified_base 28: mod_base = OTHER; note = 2'-O-Methyl-adenosine
  modified_base 29: mod_base = OTHER; note = 2'-O-Methyl-guanosine
  modified_base 30: mod_base = OTHER; note = 2'-O-Methyl-cytidine
  modified_base 31: mod_base = OTHER; note = 2'-O-Methyl-uridine
  modified_base 32: mod_base = OTHER; note = 2'-O-Methyl-adenosine
  modified_base 34: mod_base = OTHER; note = 2'-O-Methyl-adenosine
  modified_base 35: mod_base = OTHER; note = 2'-O-Methyl-adenosine
  modified_base 36: mod_base = OTHER; note = 2'-O-Methyl-adenosine
  modified_base 37: mod_base = OTHER; note = 2'-O-Methyl-uridine
  modified_base 38: mod_base = OTHER; note = 2'-O-Methyl-adenosine
  modified_base 39: mod_base = OTHER; note = 2'-O-Methyl-guanosine
  modified_base 40: mod_base = OTHER; note = 2'-O-Methyl-cytidine
  modified_base 41: mod_base = OTHER; note = 2'-O-Methyl-adenosine
  modified_base 42: mod_base = OTHER; note = 2'-O-Methyl-adenosine
  modified_base 46: mod_base = OTHER; note = 2'-O-Methyl-adenosine
  modified_base 48: mod_base = OTHER; note = 2'-O-Methyl-adenosine
  modified_base 50: mod_base = OTHER; note = 2'-O-Methyl-uridine
  modified_base 52: mod_base = OTHER; note = 2'-O-Methyl-adenosine
  modified_base 53: mod_base = OTHER; note = 2'-O-Methyl-guanosine
  modified_base 54: mod_base = OTHER; note = 2'-O-Methyl-guanosine
  modified_base 55: mod_base = OTHER; note = 2'-O-Methyl-cytidine
  modified_base 56: mod_base = OTHER; note = 2'-O-Methyl-uridine
  modified_base 57: mod_base = OTHER; note = 2'-O-Methyl-adenosine
  modified_base 60: mod_base = OTHER; note = 2'-O-Methyl-cytidine
  modified_base 61: mod_base = OTHER; note = 2'-O-Methyl-cytidine
  modified_base 66: mod_base = OTHER; note = 2'-O-Methyl-uridine
  modified_base 67: mod_base = OTHER; note = 2'-O-Methyl-cytidine
  modified_base 70: mod_base = OTHER; note = 2'-O-Methyl-cytidine
  modified_base 71: mod_base = OTHER; note = 2'-O-Methyl-uridine
  modified_base 72: mod_base = OTHER; note = 2'-O-Methyl-uridine
  modified_base 74: mod_base = OTHER; note = 2'-O-Methyl-adenosine
  modified_base 75: mod_base = OTHER; note = 2'-O-Methyl-adenosine
  modified_base 76: mod_base = OTHER; note = 2'-O-Methyl-adenosine
  modified_base 77: mod_base = OTHER; note = 2'-O-Methyl-adenosine
  modified_base 78: mod_base = OTHER; note = 2'-O-Methyl-adenosine
  modified_base 79: mod_base = OTHER; note = 2'-O-Methyl-guanosine
  modified_base 80: mod_base = OTHER; note = 2'-O-Methyl-uridine
  modified_base 81: mod_base = OTHER; note = 2'-O-Methyl-guanosine
  modified_base 83: mod_base = OTHER; note = 2'-O-Methyl-cytidine
  modified_base 84: mod_base = OTHER; note = 2'-O-Methyl-adenosine
  modified_base 85: mod_base = OTHER; note = 2'-O-Methyl-cytidine
  modified_base 86: mod_base = OTHER; note = 2'-O-Methyl-cytidine
  modified_base 87: mod_base = OTHER; note = 2'-O-Methyl-guanosine
  modified_base 88: mod_base = OTHER; note = 2'-O-Methyl-adenosine
  modified_base 89: mod_base = OTHER; note = 2'-O-Methyl-guanosine
  modified_base 90: mod_base = OTHER; note = 2'-O-Methyl-uridine
  modified_base 91: mod_base = OTHER; note = 2'-O-Methyl-cytidine
  modified_base 92: mod_base = OTHER; note = 2'-O-Methyl-guanosine
  modified_base 93: mod_base = OTHER; note = 2'-O-Methyl-guanosine
  modified_base 94: mod_base = OTHER; note = 2'-O-Methyl-uridine
  modified_base 95: mod_base = OTHER; note = 2'-O-Methyl-guanosine
  modified_base 96: mod_base = OTHER; note = 2'-O-Methyl-cytidine
  modified_base 97: mod_base = OTHER; note = 2'-O-Methyl-uridine
  modified_base 98: mod_base = OTHER; note = 2'-O-Methyl-uridine phosphorothioate
  modified_base 99: mod_base = OTHER; note = 2'-O-Methyl-uridine phosphorothioate
  modified_base 100: mod_base = OTHER; note = 2'-O-Methyl-uridine
  misc_difference 101: note = a, c, g, inosine, u, deoxyadenosine, deoxyguanosine, deoxycytidine, deoxyinosine, thymine, ribonebularine, 2'-O-methylnebularine, or 2'-deoxynebularine
  misc_difference 102: note = a, c, g, inosine, u, deoxyadenosine, deoxyguanosine, deoxycytidine, deoxyinosine, thymine, ribonebularine, 2'-O-methylnebularine, or 2'-deoxynebularine
  misc_difference 103: note = a, c, g, inosine, u, deoxyadenosine, deoxyguanosine, deoxycytidine, deoxyinosine, thymine, ribonebularine, 2'-O-methylnebularine, or 2'-deoxynebularine

SEQ ID NO: 3059 - RNA, 103 nt, synthetic construct; identical to SEQ ID NO: 1797
  source 1..103: mol_type = other RNA
  modified_base 1: mod_base = OTHER; note = 2'-O-Methyl-cytidine phosphorothioate
  modified_base 2: mod_base = OTHER; note = 2'-O-Methyl-adenosine phosphorothioate
  modified_base 3: mod_base = OTHER; note = 2'-O-Methyl-guanosine
  modified_base 21: mod_base = OTHER; note = 2'-O-Methyl-guanosine
  modified_base 25: mod_base = OTHER; note = uridine phosphorothioate
  modified_base 28: mod_base = OTHER; note = 2'-O-Methyl-adenosine
  modified_base 29: mod_base = OTHER; note = 2'-O-Methyl-guanosine
  modified_base 30: mod_base = OTHER; note = 2'-O-Methyl-cytidine
  modified_base 31: mod_base = OTHER; note = 2'-O-Methyl-uridine
  modified_base 32: mod_base = OTHER; note = 2'-O-Methyl-adenosine
  modified_base 33: mod_base = OTHER; note = 2'-O-Methyl-guanosine
  modified_base 34: mod_base = OTHER; note = 2'-O-Methyl-adenosine
  modified_base 35: mod_base = OTHER; note = 2'-O-Methyl-adenosine
  modified_base 36: mod_base = OTHER; note = 2'-O-Methyl-adenosine
  modified_base 37: mod_base = OTHER; note = 2'-O-Methyl-uridine
  modified_base 38: mod_base = OTHER; note = 2'-O-Methyl-adenosine
  modified_base 39: mod_base = OTHER; note = 2'-O-Methyl-guanosine
  modified_base 40: mod_base = OTHER; note = 2'-O-Methyl-cytidine
  modified_base 41: mod_base = OTHER; note = 2'-O-Methyl-adenosine
  modified_base 42: mod_base = OTHER; note = 2'-O-Methyl-adenosine
  modified_base 46: mod_base = OTHER; note = 2'-O-Methyl-adenosine
  modified_base 48: mod_base = OTHER; note = 2'-O-Methyl-adenosine
  modified_base 50: mod_base = OTHER; note = 2'-O-Methyl-uridine
  modified_base 52: mod_base = OTHER; note = 2'-O-Methyl-adenosine
  modified_base 53: mod_base = OTHER; note = 2'-O-Methyl-guanosine
  modified_base 54: mod_base = OTHER; note = 2'-O-Methyl-guanosine
  modified_base 57: mod_base = OTHER; note = 2'-O-Methyl-adenosine
  modified_base 61: mod_base = OTHER; note = 2'-O-Methyl-cytidine
  modified_base 66: mod_base = OTHER; note = 2'-O-Methyl-uridine
  modified_base 67: mod_base = OTHER; note = 2'-O-Methyl-cytidine
  modified_base 70: mod_base = OTHER; note = 2'-O-Methyl-cytidine
  modified_base 71: mod_base = OTHER; note = 2'-O-Methyl-uridine
  modified_base 72: mod_base = OTHER; note = 2'-O-Methyl-uridine
  modified_base 74: mod_base = OTHER; note = 2'-O-Methyl-adenosine
  modified_base 75: mod_base = OTHER; note = 2'-O-Methyl-adenosine
  modified_base 76: mod_base = OTHER; note = 2'-O-Methyl-adenosine
  modified_base 77: mod_base = OTHER; note = 2'-O-Methyl-adenosine
  modified_base 78: mod_base = OTHER; note = 2'-O-Methyl-adenosine
  modified_base 79: mod_base = OTHER; note = 2'-O-Methyl-guanosine
  modified_base 80: mod_base = OTHER; note = 2'-O-Methyl-uridine
  modified_base 82: mod_base = OTHER; note = 2'-O-Methyl-guanosine
  modified_base 83: mod_base = OTHER; note = 2'-O-Methyl-cytidine
  modified_base 84: mod_base = OTHER; note = 2'-O-Methyl-adenosine
  modified_base 85: mod_base = OTHER; note = 2'-O-Methyl-cytidine
  modified_base 86: mod_base = OTHER; note = 2'-O-Methyl-cytidine
  modified_base 87: mod_base = OTHER; note = 2'-O-Methyl-guanosine
  modified_base 89: mod_base = OTHER; note = 2'-O-Methyl-guanosine
  modified_base 92: mod_base = OTHER; note = 2'-O-Methyl-guanosine
  modified_base 93: mod_base = OTHER; note = 2'-O-Methyl-guanosine
  modified_base 94: mod_base = OTHER; note = 2'-O-Methyl-uridine
  modified_base 95: mod_base = OTHER; note = 2'-O-Methyl-guanosine
  modified_base 96: mod_base = OTHER; note = 2'-O-Methyl-cytidine
  modified_base 97: mod_base = OTHER; note = 2'-O-Methyl-uridine
  modified_base 98: mod_base = OTHER; note = 2'-O-Methyl-uridine phosphorothioate
  modified_base 99: mod_base = OTHER; note = 2'-O-Methyl-uridine phosphorothioate
  modified_base 100: mod_base = OTHER; note = 2'-O-Methyl-uridine
  misc_difference 101: note = a, c, g, inosine, u, deoxyadenosine, deoxyguanosine, deoxycytidine, deoxyinosine, thymine, ribonebularine, 2'-O-methylnebularine, or 2'-deoxynebularine
  misc_difference 102: note = a, c, g, inosine, u, deoxyadenosine, deoxyguanosine, deoxycytidine, deoxyinosine, thymine, ribonebularine, 2'-O-methylnebularine, or 2'-deoxynebularine
  misc_difference 103: note = a, c, g, inosine, u, deoxyadenosine, deoxyguanosine, deoxycytidine, deoxyinosine, thymine, ribonebularine, 2'-O-methylnebularine, or 2'-deoxynebularine

SEQ ID NO: 3060 - RNA, 103 nt, synthetic construct; identical to SEQ ID NO: 1797
  source 1..103: mol_type = other RNA
  modified_base 1: mod_base = OTHER; note = 2'-O-Methyl-cytidine phosphorothioate
  modified_base 2: mod_base = OTHER; note = 2'-O-Methyl-adenosine phosphorothioate
  modified_base 3: mod_base = OTHER; note = 2'-O-Methyl-guanosine
  modified_base 21: mod_base = OTHER; note = 2'-O-Methyl-guanosine
  modified_base 25: mod_base = OTHER; note = uridine phosphorothioate
  modified_base 28: mod_base = OTHER; note = 2'-O-Methyl-adenosine
  modified_base 29: mod_base = OTHER; note = 2'-O-Methyl-guanosine
  modified_base 30: mod_base = OTHER; note = 2'-O-Methyl-cytidine
  modified_base 31: mod_base = OTHER; note = 2'-O-Methyl-uridine
  modified_base 32: mod_base = OTHER; note = 2'-O-Methyl-adenosine
  modified_base 33: mod_base = OTHER; note = 2'-O-Methyl-guanosine
  modified_base 34: mod_base = OTHER; note = 2'-O-Methyl-adenosine
  modified_base 35: mod_base = OTHER; note = 2'-O-Methyl-adenosine
  modified_base 36: mod_base = OTHER; note = 2'-O-Methyl-adenosine
  modified_base 37: mod_base = OTHER; note = 2'-O-Methyl-uridine
  modified_base 38: mod_base = OTHER; note = 2'-O-Methyl-adenosine
  modified_base 39: mod_base = OTHER; note = 2'-O-Methyl-guanosine
  modified_base 40: mod_base = OTHER; note = 2'-O-Methyl-cytidine
  modified_base 41: mod_base = OTHER; note = 2'-O-Methyl-adenosine
  modified_base 42: mod_base = OTHER; note = 2'-O-Methyl-adenosine
  modified_base 46: mod_base = OTHER; note = 2'-O-Methyl-adenosine
  modified_base 48: mod_base = OTHER; note = 2'-O-Methyl-adenosine
  modified_base 50: mod_base = OTHER; note = 2'-O-Methyl-uridine
  modified_base 52: mod_base = OTHER; note = 2'-O-Methyl-adenosine
  modified_base 53: mod_base = OTHER; note = 2'-O-Methyl-guanosine
  modified_base 54: mod_base = OTHER; note = 2'-O-Methyl-guanosine
  modified_base 55: mod_base = OTHER; note = 2'-O-Methyl-cytidine
  modified_base 56: mod_base = OTHER; note = 2'-O-Methyl-uridine
  modified_base 57: mod_base = OTHER; note = 2'-O-Methyl-adenosine
  modified_base 60: mod_base = OTHER; note = 2'-O-Methyl-cytidine
  modified_base 61: mod_base = OTHER; note = 2'-O-Methyl-cytidine
  modified_base 66: mod_base = OTHER; note = 2'-O-Methyl-uridine
  modified_base 67: mod_base = OTHER; note = 2'-O-Methyl-cytidine
  modified_base 70: mod_base = OTHER; note = 2'-O-Methyl-cytidine
  modified_base 71: mod_base = OTHER; note = 2'-O-Methyl-uridine
  modified_base 72: mod_base = OTHER; note = 2'-O-Methyl-uridine
  modified_base 74: mod_base = OTHER; note = 2'-O-Methyl-adenosine
  modified_base 75: mod_base = OTHER; note = 2'-O-Methyl-adenosine
  modified_base 76: mod_base = OTHER; note = 2'-O-Methyl-adenosine
  modified_base 77: mod_base = OTHER; note = 2'-O-Methyl-adenosine
  modified_base 78: mod_base = OTHER; note = 2'-O-Methyl-adenosine
  modified_base 79: mod_base = OTHER; note = 2'-O-Methyl-guanosine
  modified_base 80: mod_base = OTHER; note = 2'-O-Methyl-uridine
  modified_base 82: mod_base = OTHER; note = 2'-O-Methyl-guanosine
  modified_base 83: mod_base = OTHER; note = 2'-O-Methyl-cytidine
  modified_base 84: mod_base = OTHER; note = 2'-O-Methyl-adenosine
  modified_base 85: mod_base = OTHER; note = 2'-O-Methyl-cytidine
  modified_base 86: mod_base = OTHER; note = 2'-O-Methyl-cytidine
  modified_base 87: mod_base = OTHER; note = 2'-O-Methyl-guanosine
  modified_base 89: mod_base = OTHER; note = 2'-O-Methyl-guanosine
  modified_base 92: mod_base = OTHER; note = 2'-O-Methyl-guanosine
  modified_base 93: mod_base = OTHER; note = 2'-O-Methyl-guanosine
  modified_base 94: mod_base = OTHER; note = 2'-O-Methyl-uridine
  modified_base 95: mod_base = OTHER; note = 2'-O-Methyl-guanosine
  modified_base 96: mod_base = OTHER; note = 2'-O-Methyl-cytidine
  modified_base 97: mod_base = OTHER; note = 2'-O-Methyl-uridine
  modified_base 98: mod_base = OTHER; note = 2'-O-Methyl-uridine phosphorothioate
  modified_base 99: mod_base = OTHER; note = 2'-O-Methyl-uridine phosphorothioate
  modified_base 100: mod_base = OTHER; note = 2'-O-Methyl-uridine
  misc_difference 101: note = a, c, g, inosine, u, deoxyadenosine, deoxyguanosine, deoxycytidine, deoxyinosine, thymine, ribonebularine, 2'-O-methylnebularine, or 2'-deoxynebularine
  misc_difference 102: note = a, c, g, inosine, u, deoxyadenosine, deoxyguanosine, deoxycytidine, deoxyinosine, thymine, ribonebularine, 2'-O-methylnebularine, or 2'-deoxynebularine
  misc_difference 103: note = a, c, g, inosine, u, deoxyadenosine, deoxyguanosine, deoxycytidine, deoxyinosine, thymine, ribonebularine, 2'-O-methylnebularine, or 2'-deoxynebularine

SEQ ID NO: 3061 - RNA, 103 nt, synthetic construct; identical to SEQ ID NO: 1797
  source 1..103: mol_type = other RNA
  modified_base 1: mod_base = OTHER; note = 2'-O-Methyl-cytidine phosphorothioate
  modified_base 2: mod_base = OTHER; note = 2'-O-Methyl-adenosine phosphorothioate
  modified_base 3: mod_base = OTHER; note = 2'-O-Methyl-guanosine
  modified_base 21: mod_base = OTHER; note = 2'-O-Methyl-guanosine
  modified_base 25: mod_base = OTHER; note = uridine phosphorothioate
  modified_base 28: mod_base = OTHER; note = 2'-O-Methyl-adenosine
  modified_base 29: mod_base = OTHER; note = 2'-O-Methyl-guanosine
  modified_base 30: mod_base = OTHER; note = 2'-O-Methyl-cytidine
  modified_base 31: mod_base = OTHER; note = 2'-O-Methyl-uridine
  modified_base 32: mod_base = OTHER; note = 2'-O-Methyl-adenosine
  modified_base 33: mod_base = OTHER; note = 2'-O-Methyl-guanosine
  modified_base 34: mod_base = OTHER; note = 2'-O-Methyl-adenosine
  modified_base 35: mod_base = OTHER; note = 2'-O-Methyl-adenosine
  modified_base 36: mod_base = OTHER; note = 2'-O-Methyl-adenosine
  modified_base 37: mod_base = OTHER; note = 2'-O-Methyl-uridine
  modified_base 38: mod_base = OTHER; note = 2'-O-Methyl-adenosine
  modified_base 39: mod_base = OTHER; note = 2'-O-Methyl-guanosine
  modified_base 40: mod_base = OTHER; note = 2'-O-Methyl-cytidine
  modified_base 41: mod_base = OTHER; note = 2'-O-Methyl-adenosine
  modified_base 42: mod_base = OTHER; note = 2'-O-Methyl-adenosine
  modified_base 46: mod_base = OTHER; note = 2'-O-Methyl-adenosine
  modified_base 48: mod_base = OTHER; note = 2'-O-Methyl-adenosine
  modified_base 50: mod_base = OTHER; note = 2'-O-Methyl-uridine
  modified_base 52: mod_base = OTHER; note = 2'-O-Methyl-adenosine
  modified_base 53: mod_base = OTHER; note = 2'-O-Methyl-guanosine
  modified_base 54: mod_base = OTHER; note = 2'-O-Methyl-guanosine
  modified_base 57: mod_base = OTHER; note = 2'-O-Methyl-adenosine
  modified_base 61: mod_base = OTHER; note = 2'-O-Methyl-cytidine
  modified_base 66: mod_base = OTHER; note = 2'-O-Methyl-uridine
  modified_base 67: mod_base = OTHER; note = 2'-O-Methyl-cytidine
  modified_base 70: mod_base = OTHER; note = 2'-O-Methyl-cytidine
  modified_base 71: mod_base = OTHER; note = 2'-O-Methyl-uridine
  modified_base 72: mod_base = OTHER; note = 2'-O-Methyl-uridine
  modified_base 73: mod_base = OTHER; note = 2'-O-Methyl-guanosine
  modified_base 74: mod_base = OTHER; note = 2'-O-Methyl-adenosine
  modified_base 75: mod_base = OTHER; note = 2'-O-Methyl-adenosine
  modified_base 76: mod_base = OTHER; note = 2'-O-Methyl-adenosine
  modified_base 77: mod_base = OTHER; note = 2'-O-Methyl-adenosine
  modified_base 78: mod_base = OTHER; note = 2'-O-Methyl-adenosine
  modified_base 79: mod_base = OTHER; note = 2'-O-Methyl-guanosine
  modified_base 80: mod_base = OTHER; note = 2'-O-Methyl-uridine
  modified_base 82: mod_base = OTHER; note = 2'-O-Methyl-guanosine
  modified_base 83: mod_base = OTHER; note = 2'-O-Methyl-cytidine
  modified_base 84: mod_base = OTHER; note = 2'-O-Methyl-adenosine
  modified_base 85: mod_base = OTHER; note = 2'-O-Methyl-cytidine
  modified_base 86: mod_base = OTHER; note = 2'-O-Methyl-cytidine
  modified_base 87: mod_base = OTHER; note = 2'-O-Methyl-guanosine
  modified_base 89: mod_base = OTHER; note = 2'-O-Methyl-guanosine
  modified_base 92: mod_base = OTHER; note = 2'-O-Methyl-guanosine
  modified_base 93: mod_base = OTHER; note = 2'-O-Methyl-guanosine
  modified_base 94: mod_base = OTHER; note = 2'-O-Methyl-uridine
  modified_base 95: mod_base = OTHER; note = 2'-O-Methyl-guanosine
  modified_base 96: mod_base = OTHER; note = 2'-O-Methyl-cytidine
  modified_base 97: mod_base = OTHER; note = 2'-O-Methyl-uridine
  modified_base 98: mod_base = OTHER; note = 2'-O-Methyl-uridine phosphorothioate
  modified_base 99: mod_base = OTHER; note = 2'-O-Methyl-uridine phosphorothioate
  modified_base 100: mod_base = OTHER; note = 2'-O-Methyl-uridine
  misc_difference 101: note = a, c, g, inosine, u, deoxyadenosine, deoxyguanosine, deoxycytidine, deoxyinosine, thymine, ribonebularine, 2'-O-methylnebularine, or 2'-deoxynebularine
  misc_difference 102: note = a, c, g, inosine, u, deoxyadenosine, deoxyguanosine, deoxycytidine, deoxyinosine, thymine, ribonebularine, 2'-O-methylnebularine, or 2'-deoxynebularine
  misc_difference 103: note = a, c, g, inosine, u, deoxyadenosine, deoxyguanosine, deoxycytidine, deoxyinosine, thymine, ribonebularine, 2'-O-methylnebularine, or 2'-deoxynebularine

SEQ ID NO: 3062 - RNA, 103 nt, synthetic construct; identical to SEQ ID NO: 1797
  source 1..103: mol_type = other RNA
  modified_base 1: mod_base = OTHER; note = 2'-O-Methyl-cytidine phosphorothioate
  modified_base 2: mod_base = OTHER; note = 2'-O-Methyl-adenosine phosphorothioate
  modified_base 3: mod_base = OTHER; note = 2'-O-Methyl-guanosine
  modified_base 21: mod_base = OTHER; note = 2'-O-Methyl-guanosine
  modified_base 25: mod_base = OTHER; note = uridine phosphorothioate
  modified_base 28: mod_base = OTHER; note = 2'-O-Methyl-adenosine
  modified_base 29: mod_base = OTHER; note = 2'-O-Methyl-guanosine
  modified_base 30: mod_base = OTHER; note = 2'-O-Methyl-cytidine
  modified_base 31: mod_base = OTHER; note = 2'-O-Methyl-uridine
  modified_base 32: mod_base = OTHER; note = 2'-O-Methyl-adenosine
  modified_base 33: mod_base = OTHER; note = 2'-O-Methyl-guanosine
  modified_base 34: mod_base = OTHER; note = 2'-O-Methyl-adenosine
  modified_base 35: mod_base = OTHER; note = 2'-O-Methyl-adenosine
  modified_base 36: mod_base = OTHER; note = 2'-O-Methyl-adenosine
  modified_base 37: mod_base = OTHER; note = 2'-O-Methyl-uridine
  modified_base 38: mod_base = OTHER; note = 2'-O-Methyl-adenosine
  modified_base 39: mod_base = OTHER; note = 2'-O-Methyl-guanosine
  modified_base 40: mod_base = OTHER; note = 2'-O-Methyl-cytidine
  modified_base 41: mod_base = OTHER; note = 2'-O-Methyl-adenosine
  modified_base 42: mod_base = OTHER; note = 2'-O-Methyl-adenosine
  modified_base 46: mod_base = OTHER; note = 2'-O-Methyl-adenosine
  modified_base 48: mod_base = OTHER; note = 2'-O-Methyl-adenosine
  modified_base 50: mod_base = OTHER; note = 2'-O-Methyl-uridine
  modified_base 52: mod_base = OTHER; note = 2'-O-Methyl-adenosine
  modified_base 53: mod_base = OTHER; note = 2'-O-Methyl-guanosine
  modified_base 54: mod_base = OTHER; note = 2'-O-Methyl-guanosine
  modified_base 57: mod_base = OTHER; note = 2'-O-Methyl-adenosine
  modified_base 61: mod_base = OTHER; note = 2'-O-Methyl-cytidine
  modified_base 66: mod_base = OTHER; note = 2'-O-Methyl-uridine
  modified_base 67: mod_base = OTHER; note = 2'-O-Methyl-cytidine
  modified_base 70: mod_base = OTHER; note = 2'-O-Methyl-cytidine
  modified_base 71: mod_base = OTHER; note = 2'-O-Methyl-uridine
  modified_base 72: mod_base = OTHER; note = 2'-O-Methyl-uridine
  modified_base 73: mod_base = OTHER; note = 2'-O-Methyl-guanosine
  modified_base 74: mod_base = OTHER; note = 2'-O-Methyl-adenosine
  modified_base 75: mod_base = OTHER; note = 2'-O-Methyl-adenosine
  modified_base 76: mod_base = OTHER; note = 2'-O-Methyl-adenosine
  modified_base 77: mod_base = OTHER; note = 2'-O-Methyl-adenosine
  modified_base 78: mod_base = OTHER; note = 2'-O-Methyl-adenosine
  modified_base 79: mod_base = OTHER; note = 2'-O-Methyl-guanosine
  modified_base 80: mod_base = OTHER; note = 2'-O-Methyl-uridine
  modified_base 82: mod_base = OTHER; note = 2'-O-Methyl-guanosine
  modified_base 83: mod_base = OTHER; note = 2'-O-Methyl-cytidine
  modified_base 84: mod_base = OTHER; note = 2'-O-Methyl-adenosine
  modified_base 85: mod_base = OTHER; note = 2'-O-Methyl-cytidine
  modified_base 86: mod_base = OTHER; note = 2'-O-Methyl-cytidine
  modified_base 87: mod_base = OTHER; note = 2'-O-Methyl-guanosine
  modified_base 89: mod_base = OTHER; note = 2'-O-Methyl-guanosine
  modified_base 91: mod_base = OTHER; note = 2'-O-Methyl-cytidine
  modified_base 92: mod_base = OTHER; note = 2'-O-Methyl-guanosine
  modified_base 93: mod_base = OTHER; note = 2'-O-Methyl-guanosine
  modified_base 94: mod_base = OTHER; note = 2'-O-Methyl-uridine
  modified_base 95: mod_base = OTHER; note = 2'-O-Methyl-guanosine
  modified_base 96: mod_base = OTHER; note = 2'-O-Methyl-cytidine
  modified_base 97: mod_base = OTHER; note = 2'-O-Methyl-uridine
  modified_base 98: mod_base = OTHER; note = 2'-O-Methyl-uridine phosphorothioate
  modified_base 99: mod_base = OTHER; note = 2'-O-Methyl-uridine phosphorothioate
  modified_base 100: mod_base = OTHER; note = 2'-O-Methyl-uridine
  misc_difference 101: note = a, c, g, inosine, u, deoxyadenosine, deoxyguanosine, deoxycytidine, deoxyinosine, thymine, ribonebularine, 2'-O-methylnebularine, or 2'-deoxynebularine
  misc_difference 102: note = a, c, g, inosine, u, deoxyadenosine, deoxyguanosine, deoxycytidine, deoxyinosine, thymine, ribonebularine, 2'-O-methylnebularine, or 2'-deoxynebularine
  misc_difference 103: note = a, c, g, inosine, u, deoxyadenosine, deoxyguanosine, deoxycytidine, deoxyinosine, thymine, ribonebularine, 2'-O-methylnebularine, or 2'-deoxynebularine

SEQ ID NO: 3063 - RNA, 103 nt, synthetic construct; identical to SEQ ID NO: 1797
  source 1..103: mol_type = other RNA
  modified_base 1: mod_base = OTHER; note = 2'-O-Methyl-cytidine phosphorothioate
  modified_base 2: mod_base = OTHER; note = 2'-O-Methyl-adenosine phosphorothioate
  modified_base 3: mod_base = OTHER; note = 2'-O-Methyl-guanosine
  modified_base 21: mod_base = OTHER; note = 2'-O-Methyl-guanosine
  modified_base 25: mod_base = OTHER; note = uridine phosphorothioate
  modified_base 28: mod_base = OTHER; note = 2'-O-Methyl-adenosine
  modified_base 29: mod_base = OTHER; note = 2'-O-Methyl-guanosine
  modified_base 30: mod_base = OTHER; note = 2'-O-Methyl-cytidine
  modified_base 31: mod_base = OTHER; note = 2'-O-Methyl-uridine
  modified_base 32: mod_base = OTHER; note = 2'-O-Methyl-adenosine
  modified_base 34: mod_base = OTHER; note = 2'-O-Methyl-adenosine
  modified_base 35: mod_base = OTHER; note = 2'-O-Methyl-adenosine
  modified_base 36: mod_base = OTHER; note = 2'-O-Methyl-adenosine
  modified_base 37: mod_base = OTHER; note = 2'-O-Methyl-uridine
  modified_base 38: mod_base = OTHER; note = 2'-O-Methyl-adenosine
  modified_base 39: mod_base = OTHER; note = 2'-O-Methyl-guanosine
  modified_base 40: mod_base = OTHER; note = 2'-O-Methyl-cytidine
  modified_base 41: mod_base = OTHER; note = 2'-O-Methyl-adenosine
  modified_base 42: mod_base = OTHER; note = 2'-O-Methyl-adenosine
  modified_base 46: mod_base = OTHER; note = 2'-O-Methyl-adenosine
  modified_base 48: mod_base = OTHER; note = 2'-O-Methyl-adenosine
  modified_base 50: mod_base = OTHER; note = 2'-O-Methyl-uridine
  modified_base 52: mod_base = OTHER; note = 2'-O-Methyl-adenosine
  modified_base 53: mod_base = OTHER; note = 2'-O-Methyl-guanosine
  modified_base 54: mod_base = OTHER; note = 2'-O-Methyl-guanosine
  modified_base 57: mod_base = OTHER; note = 2'-O-Methyl-adenosine
  modified_base 61: mod_base = OTHER; note = 2'-O-Methyl-cytidine
  modified_base 66: mod_base = OTHER; note = 2'-O-Methyl-uridine
  modified_base 67: mod_base = OTHER; note = 2'-O-Methyl-cytidine
  modified_base 70: mod_base = OTHER; note = 2'-O-Methyl-cytidine
  modified_base 71: mod_base = OTHER; note = 2'-O-Methyl-uridine
  modified_base 72: mod_base = OTHER; note = 2'-O-Methyl-uridine
  modified_base 73: mod_base = OTHER; note = 2'-O-Methyl-guanosine
  modified_base 74: mod_base = OTHER; note = 2'-O-Methyl-adenosine
  modified_base 75: mod_base = OTHER; note = 2'-O-Methyl-adenosine
  modified_base 76: mod_base = OTHER; note = 2'-O-Methyl-adenosine
  modified_base 77: mod_base = OTHER; note = 2'-O-Methyl-adenosine
  modified_base 78: mod_base = OTHER; note = 2'-O-Methyl-adenosine
  modified_base 79: mod_base = OTHER; note = 2'-O-Methyl-guanosine
  modified_base 80: mod_base = OTHER; note = 2'-O-Methyl-uridine
  modified_base 82: mod_base = OTHER; note = 2'-O-Methyl-guanosine
  modified_base 83: mod_base = OTHER; note = 2'-O-Methyl-cytidine
  modified_base 84: mod_base = OTHER; note = 2'-O-Methyl-adenosine
  modified_base 85: mod_base = OTHER; note = 2'-O-Methyl-cytidine
  modified_base 86: mod_base = OTHER; note = 2'-O-Methyl-cytidine
  modified_base 87: mod_base = OTHER; note = 2'-O-Methyl-guanosine
  modified_base 89: mod_base = OTHER; note = 2'-O-Methyl-guanosine
  modified_base 91: mod_base = OTHER; note = 2'-O-Methyl-cytidine
  modified_base 92: mod_base = OTHER; note = 2'-O-Methyl-guanosine
  modified_base 93: mod_base = OTHER; note = 2'-O-Methyl-guanosine
  modified_base 94: mod_base = OTHER; note = 2'-O-Methyl-uridine
  modified_base 95: mod_base = OTHER; note = 2'-O-Methyl-guanosine
  modified_base 96: mod_base = OTHER; note = 2'-O-Methyl-cytidine
  modified_base 97: mod_base = OTHER; note = 2'-O-Methyl-uridine
  modified_base 98: mod_base = OTHER; note = 2'-O-Methyl-uridine phosphorothioate
  modified_base 99: mod_base = OTHER; note = 2'-O-Methyl-uridine phosphorothioate
  modified_base 100: mod_base = OTHER; note = 2'-O-Methyl-uridine
  misc_difference 101: note = a, c, g, inosine, u, deoxyadenosine, deoxyguanosine, deoxycytidine, deoxyinosine, thymine, ribonebularine, 2'-O-methylnebularine, or 2'-deoxynebularine
  misc_difference 102: note = a, c, g, inosine, u, deoxyadenosine, deoxyguanosine, deoxycytidine, deoxyinosine, thymine, ribonebularine, 2'-O-methylnebularine, or 2'-deoxynebularine
  misc_difference 103: note = a, c, g, inosine, u, deoxyadenosine, deoxyguanosine, deoxycytidine, deoxyinosine, thymine, ribonebularine, 2'-O-methylnebularine, or 2'-deoxynebularine

SEQ ID NO: 3064 - RNA, 103 nt, synthetic construct; identical to SEQ ID NO: 1797
  source 1..103: mol_type = other RNA
  modified_base 1: mod_base = OTHER; note = 2'-O-Methyl-cytidine phosphorothioate
  modified_base 2: mod_base = OTHER; note = 2'-O-Methyl-adenosine phosphorothioate
  modified_base 3: mod_base = OTHER; note = 2'-O-Methyl-guanosine
  modified_base 21: mod_base = OTHER; note = 2'-O-Methyl-guanosine
  modified_base 25: mod_base = OTHER; note = uridine phosphorothioate
  modified_base 28: mod_base = OTHER; note = 2'-O-Methyl-adenosine
  modified_base 29: mod_base = OTHER; note = 2'-O-Methyl-guanosine
  modified_base 30: mod_base = OTHER; note = 2'-O-Methyl-cytidine
  modified_base 31: mod_base = OTHER; note = 2'-O-Methyl-uridine
  modified_base 32: mod_base = OTHER; note = 2'-O-Methyl-adenosine
  modified_base 34: mod_base = OTHER; note = 2'-O-Methyl-adenosine
  modified_base 35: mod_base = OTHER; note = 2'-O-Methyl-adenosine
  modified_base 36: mod_base = OTHER; note = 2'-O-Methyl-adenosine
  modified_base 37: mod_base = OTHER; note = 2'-O-Methyl-uridine
  modified_base 38: mod_base = OTHER; note = 2'-O-Methyl-adenosine
  modified_base 39: mod_base = OTHER; note = 2'-O-Methyl-guanosine
  modified_base 40: mod_base = OTHER; note = 2'-O-Methyl-cytidine
  modified_base 41: mod_base = OTHER; note = 2'-O-Methyl-adenosine
  modified_base 42: mod_base = OTHER; note = 2'-O-Methyl-adenosine
  modified_base 46: mod_base = OTHER; note = 2'-O-Methyl-adenosine
  modified_base 48: mod_base = OTHER; note = 2'-O-Methyl-adenosine
  modified_base 50: mod_base = OTHER; note = 2'-O-Methyl-uridine
  modified_base 52: mod_base = OTHER; note = 2'-O-Methyl-adenosine
  modified_base 53: mod_base = OTHER; note = 2'-O-Methyl-guanosine
  modified_base 54: mod_base = OTHER; note = 2'-O-Methyl-guanosine
  modified_base 55: mod_base = OTHER; note = 2'-O-Methyl-cytidine
  modified_base 56: mod_base = OTHER; note = 2'-O-Methyl-uridine
  modified_base 57: mod_base = OTHER; note = 2'-O-Methyl-adenosine
  modified_base 60: mod_base = OTHER; note = 2'-O-Methyl-cytidine
  modified_base 61: mod_base = OTHER; note = 2'-O-Methyl-cytidine
  modified_base 66: mod_base = OTHER; note = 2'-O-Methyl-uridine
  modified_base 67: mod_base = OTHER; note = 2'-O-Methyl-cytidine
  modified_base 70: mod_base = OTHER; note = 2'-O-Methyl-cytidine
  modified_base 71: mod_base = OTHER; note = 2'-O-Methyl-uridine
  modified_base 72: mod_base = OTHER; note = 2'-O-Methyl-uridine
  modified_base 74: mod_base = OTHER; note = 2'-O-Methyl-adenosine
  modified_base 75: mod_base = OTHER; note = 2'-O-Methyl-adenosine
  modified_base 76: mod_base = OTHER; note = 2'-O-Methyl-adenosine
  modified_base 77: mod_base = OTHER; note = 2'-O-Methyl-adenosine
  modified_base 78: mod_base = OTHER; note = 2'-O-Methyl-adenosine
  modified_base 79: mod_base = OTHER; note = 2'-O-Methyl-guanosine
  modified_base 80: mod_base = OTHER; note = 2'-O-Methyl-uridine
  modified_base 82: mod_base = OTHER; note = 2'-O-Methyl-guanosine
  modified_base 83: mod_base = OTHER; note = 2'-O-Methyl-cytidine
  modified_base 84: mod_base = OTHER; note = 2'-O-Methyl-adenosine
  modified_base 85: mod_base = OTHER; note = 2'-O-Methyl-cytidine
  modified_base 86: mod_base = OTHER; note = 2'-O-Methyl-cytidine
  modified_base 87: mod_base = OTHER; note = 2'-O-Methyl-guanosine
  modified_base 89: mod_base = OTHER; note = 2'-O-Methyl-guanosine
  modified_base 92: mod_base = OTHER; note = 2'-O-Methyl-guanosine
  modified_base 93: mod_base = OTHER; note = 2'-O-Methyl-guanosine
  modified_base 94: mod_base = OTHER; note = 2'-O-Methyl-uridine
  modified_base 95: mod_base = OTHER; note = 2'-O-Methyl-guanosine
  modified_base 96: mod_base = OTHER; note = 2'-O-Methyl-cytidine
  modified_base 97: mod_base = OTHER; note = 2'-O-Methyl-uridine
  modified_base 98: mod_base = OTHER; note = 2'-O-Methyl-uridine phosphorothioate
  modified_base 99: mod_base = OTHER; note = 2'-O-Methyl-uridine phosphorothioate
  modified_base 100: mod_base = OTHER; note = 2'-O-Methyl-uridine
  misc_difference 101: note = a, c, g, inosine, u, deoxyadenosine, deoxyguanosine, deoxycytidine, deoxyinosine, thymine, ribonebularine, 2'-O-methylnebularine, or 2'-deoxynebularine
  misc_difference 102: note = a, c, g, inosine, u, deoxyadenosine, deoxyguanosine, deoxycytidine, deoxyinosine, thymine, ribonebularine, 2'-O-methylnebularine, or 2'-deoxynebularine
  misc_difference 103: note = a, c, g, inosine, u, deoxyadenosine, deoxyguanosine, deoxycytidine, deoxyinosine, thymine, ribonebularine, 2'-O-methylnebularine, or 2'-deoxynebularine

SEQ ID NO: 3065 - RNA, 103 nt, synthetic construct; identical to SEQ ID NO: 1795
  source 1..103: mol_type = other RNA
  modified_base 1: mod_base = OTHER; note = 2'-O-Methyl-cytidine phosphorothioate
  modified_base 2: mod_base = OTHER; note = 2'-O-Methyl-cytidine phosphorothioate
  modified_base 3: mod_base = OTHER; note = 2'-O-Methyl-cytidine
  modified_base 21: mod_base = OTHER; note = 2'-O-Methyl-guanosine
  modified_base 28: mod_base = OTHER; note = 2'-O-Methyl-adenosine
  modified_base 29: mod_base = OTHER; note = 2'-O-Methyl-guanosine
  modified_base 30: mod_base = OTHER; note = 2'-O-Methyl-cytidine
  modified_base 31: mod_base = OTHER; note = 2'-O-Methyl-uridine
  modified_base 32: mod_base = OTHER; note = 2'-O-Methyl-adenosine
  modified_base 33: mod_base = OTHER; note = 2'-O-Methyl-guanosine
  modified_base 34: mod_base = OTHER; note = 2'-O-Methyl-adenosine
  modified_base 35: mod_base = OTHER; note = 2'-O-Methyl-adenosine
  modified_base 36: mod_base = OTHER; note = 2'-O-Methyl-adenosine
  modified_base 37: mod_base = OTHER; note = 2'-O-Methyl-uridine
  modified_base 38: mod_base = OTHER; note = 2'-O-Methyl-adenosine
  modified_base 39: mod_base = OTHER; note = 2'-O-Methyl-guanosine
  modified_base 40: mod_base = OTHER; note = 2'-O-Methyl-cytidine
  modified_base 41: mod_base = OTHER; note = 2'-O-Methyl-adenosine
  modified_base 42: mod_base = OTHER; note = 2'-O-Methyl-adenosine
  modified_base 45: mod_base = OTHER; note = uridine phosphorothioate
  modified_base 46: mod_base = OTHER; note = 2'-O-Methyl-adenosine
  modified_base 48: mod_base = OTHER; note = 2'-O-Methyl-adenosine
  modified_base 50: mod_base = OTHER; note = 2'-O-Methyl-uridine
  modified_base 52: mod_base = OTHER; note = 2'-O-Methyl-adenosine
  modified_base 53: mod_base = OTHER; note = 2'-O-Methyl-guanosine
  modified_base 54: mod_base = OTHER; note = 2'-O-Methyl-guanosine
  modified_base 55: mod_base = OTHER; note = 2'-O-Methyl-cytidine
  modified_base 56: mod_base = OTHER; note = 2'-O-Methyl-uridine
  modified_base 57: mod_base = OTHER; note = 2'-O-Methyl-adenosine
  modified_base 60: mod_base = OTHER; note = 2'-O-Methyl-cytidine
  modified_base 61: mod_base = OTHER; note = 2'-O-Methyl-cytidine
  modified_base 64: mod_base = OTHER; note = uridine phosphorothioate
  modified_base 66: mod_base = OTHER; note = 2'-O-Methyl-uridine
  modified_base 67: mod_base = OTHER; note = 2'-O-Methyl-cytidine
  modified_base 70: mod_base = OTHER; note = 2'-O-Methyl-cytidine
  modified_base 71: mod_base = OTHER; note = 2'-O-Methyl-uridine
  modified_base 72: mod_base = OTHER; note = 2'-O-Methyl-uridine
  modified_base 73: mod_base = OTHER; note = 2'-O-Methyl-guanosine
  modified_base 74: mod_base = OTHER; note = 2'-O-Methyl-adenosine
  modified_base 75: mod_base = OTHER; note = 2'-O-Methyl-adenosine
  modified_base 76: mod_base = OTHER; note = 2'-O-Methyl-adenosine
  modified_base 77: mod_base = OTHER; note = 2'-O-Methyl-adenosine
  modified_base 78: mod_base = OTHER; note = 2'-O-Methyl-adenosine
  modified_base 79: mod_base = OTHER; note = 2'-O-Methyl-guanosine
  modified_base 80: mod_base = OTHER; note = 2'-O-Methyl-uridine
  modified_base 81: mod_base = OTHER; note = 2'-O-Methyl-guanosine
  modified_base 83: mod_base = OTHER; note = 2'-O-Methyl-cytidine
  modified_base 84: mod_base = OTHER; note = 2'-O-Methyl-adenosine
  modified_base 85: mod_base = OTHER; note = 2'-O-Methyl-cytidine
  modified_base 86: mod_base = OTHER; note = 2'-O-Methyl-cytidine
  modified_base 87: mod_base = OTHER; note = 2'-O-Methyl-guanosine
  modified_base 88: mod_base = OTHER; note = 2'-O-Methyl-adenosine
  modified_base 89: mod_base = OTHER; note = 2'-O-Methyl-guanosine
  modified_base 90: mod_base = OTHER; note = 2'-O-Methyl-uridine
  modified_base 91: mod_base = OTHER; note = 2'-O-Methyl-cytidine
  modified_base 92: mod_base = OTHER; note = 2'-O-Methyl-guanosine
  modified_base 93: mod_base = OTHER; note = 2'-O-Methyl-guanosine
  modified_base 94: mod_base = OTHER; note = 2'-O-Methyl-uridine
  modified_base 95: mod_base = OTHER; note = 2'-O-Methyl-guanosine
  modified_base 96: mod_base = OTHER; note = 2'-O-Methyl-cytidine
  modified_base 97: mod_base = OTHER; note = 2'-O-Methyl-uridine
  modified_base 98: mod_base = OTHER; note = 2'-O-Methyl-uridine phosphorothioate
  modified_base 99: mod_base = OTHER; note = 2'-O-Methyl-uridine phosphorothioate
  modified_base 100: mod_base = OTHER; note = 2'-O-Methyl-uridine
  misc_difference 101: note = a, c, g, inosine, u, deoxyadenosine, deoxyguanosine, deoxycytidine, deoxyinosine, thymine, ribonebularine, 2'-O-methylnebularine, or 2'-deoxynebularine
  misc_difference 102: note = a, c, g, inosine, u, deoxyadenosine, deoxyguanosine, deoxycytidine, deoxyinosine, thymine, ribonebularine, 2'-O-methylnebularine, or 2'-deoxynebularine
  misc_difference 103: note = a, c, g, inosine, u, deoxyadenosine, deoxyguanosine, deoxycytidine, deoxyinosine, thymine, ribonebularine, 2'-O-methylnebularine, or 2'-deoxynebularine

SEQ ID NO: 3066 - RNA, 103 nt, synthetic construct; identical to SEQ ID NO: 1795
  source 1..103: mol_type = other RNA
  modified_base 1: mod_base = OTHER; note = 2'-O-Methyl-cytidine phosphorothioate
  modified_base 2: mod_base = OTHER; note = 2'-O-Methyl-cytidine phosphorothioate
  modified_base 3: mod_base = OTHER; note = 2'-O-Methyl-cytidine
  modified_base 21: mod_base = OTHER; note = 2'-O-Methyl-guanosine
  modified_base 28: mod_base = OTHER; note = 2'-O-Methyl-adenosine
  modified_base 29: mod_base = OTHER; note = 2'-O-Methyl-guanosine
  modified_base 30: mod_base = OTHER; note = 2'-O-Methyl-cytidine
  modified_base 31: mod_base = OTHER; note = 2'-O-Methyl-uridine
  modified_base 32: mod_base = OTHER; note = 2'-O-Methyl-adenosine
  modified_base 34: mod_base = OTHER; note = 2'-O-Methyl-adenosine
  modified_base 35: mod_base = OTHER; note = 2'-O-Methyl-adenosine
  modified_base 36: mod_base = OTHER; note = 2'-O-Methyl-adenosine
  modified_base 37: mod_base = OTHER; note = 2'-O-Methyl-uridine
  modified_base 38: mod_base = OTHER; note = 2'-O-Methyl-adenosine
  modified_base 39: mod_base = OTHER; note = 2'-O-Methyl-guanosine
  modified_base 40: mod_base = OTHER; note = 2'-O-Methyl-cytidine
  modified_base 41: mod_base = OTHER; note = 2'-O-Methyl-adenosine
  modified_base 42: mod_base = OTHER; note = 2'-O-Methyl-adenosine
  modified_base 45: mod_base = OTHER; note = uridine phosphorothioate
  modified_base 46: mod_base = OTHER; note = 2'-O-Methyl-adenosine
  modified_base 48: mod_base = OTHER; note = 2'-O-Methyl-adenosine
  modified_base 50: mod_base = OTHER; note = 2'-O-Methyl-uridine
  modified_base 52: mod_base = OTHER; note = 2'-O-Methyl-adenosine
  modified_base 53: mod_base = OTHER; note = 2'-O-Methyl-guanosine
  modified_base 54: mod_base = OTHER; note = 2'-O-Methyl-guanosine
  modified_base 55: mod_base = OTHER; note = 2'-O-Methyl-cytidine
  modified_base 56: mod_base = OTHER; note = 2'-O-Methyl-uridine
  modified_base 57: mod_base = OTHER; note = 2'-O-Methyl-adenosine
  modified_base 60: mod_base = OTHER; note = 2'-O-Methyl-cytidine
  modified_base 61: mod_base = OTHER; note = 2'-O-Methyl-cytidine
  modified_base 64: mod_base = OTHER; note = uridine phosphorothioate
  modified_base 66: mod_base = OTHER; note = 2'-O-Methyl-uridine
  modified_base 67: mod_base = OTHER; note = 2'-O-Methyl-cytidine
  modified_base 70: mod_base = OTHER; note = 2'-O-Methyl-cytidine
  modified_base 71: mod_base = OTHER; note = 2'-O-Methyl-uridine
  modified_base 72: mod_base = OTHER; note = 2'-O-Methyl-uridine
  modified_base 74: mod_base = OTHER; note = 2'-O-Methyl-adenosine
  modified_base 75: mod_base = OTHER; note = 2'-O-Methyl-adenosine
  modified_base 76: mod_base = OTHER; note = 2'-O-Methyl-adenosine
  modified_base 77: mod_base = OTHER; note = 2'-O-Methyl-adenosine
  modified_base 78: mod_base = OTHER; note = 2'-O-Methyl-adenosine
  modified_base 79: mod_base = OTHER; note = 2'-O-Methyl-guanosine
  modified_base 80: mod_base = OTHER; note = 2'-O-Methyl-uridine
  modified_base 81: mod_base = OTHER; note = 2'-O-Methyl-guanosine
  modified_base 83: mod_base = OTHER; note = 2'-O-Methyl-cytidine
  modified_base 84: mod_base = OTHER; note = 2'-O-Methyl-adenosine
  modified_base 85: mod_base = OTHER; note = 2'-O-Methyl-cytidine
  modified_base 86: mod_base = OTHER; note = 2'-O-Methyl-cytidine
  modified_base 87: mod_base = OTHER; note = 2'-O-Methyl-guanosine
  modified_base 88: mod_base = OTHER; note = 2'-O-Methyl-adenosine
  modified_base 89: mod_base = OTHER; note = 2'-O-Methyl-guanosine
  modified_base 90: mod_base = OTHER; note = 2'-O-Methyl-uridine
  modified_base 91: mod_base = OTHER; note = 2'-O-Methyl-cytidine
  modified_base 92: mod_base = OTHER; note = 2'-O-Methyl-guanosine
  modified_base 93: mod_base = OTHER; note = 2'-O-Methyl-guanosine
  modified_base 94: mod_base = OTHER; note = 2'-O-Methyl-uridine
  modified_base 95: mod_base = OTHER; note = 2'-O-Methyl-guanosine
  modified_base 96: mod_base = OTHER; note = 2'-O-Methyl-cytidine
  modified_base 97: mod_base = OTHER; note = 2'-O-Methyl-uridine
  modified_base 98: mod_base = OTHER; note = 2'-O-Methyl-uridine phosphorothioate
  modified_base 99: mod_base = OTHER; note = 2'-O-Methyl-uridine phosphorothioate
  modified_base 100: mod_base = OTHER; note = 2'-O-Methyl-uridine
  misc_difference 101: note = a, c, g, inosine, u, deoxyadenosine, deoxyguanosine, deoxycytidine, deoxyinosine, thymine, ribonebularine, 2'-O-methylnebularine, or 2'-deoxynebularine
  misc_difference 102: note = a, c, g, inosine, u, deoxyadenosine, deoxyguanosine, deoxycytidine, deoxyinosine, thymine, ribonebularine, 2'-O-methylnebularine, or 2'-deoxynebularine
  misc_difference 103: note = a, c, g, inosine, u, deoxyadenosine, deoxyguanosine, deoxycytidine, deoxyinosine, thymine, ribonebularine, 2'-O-methylnebularine, or 2'-deoxynebularine

SEQ ID NO: 3067 - RNA, 103 nt, synthetic construct; identical to SEQ ID NO: 1796
  source 1..103: mol_type = other RNA
  modified_base 1: mod_base = OTHER; note = 2'-O-Methyl-guanosine phosphorothioate
  modified_base 2: mod_base = OTHER; note = 2'-O-Methyl-adenosine phosphorothioate
  modified_base 3: mod_base = OTHER; note = 2'-O-Methyl-guanosine
  modified_base 21: mod_base = OTHER; note = 2'-O-Methyl-guanosine
  modified_base 28: mod_base = OTHER; note = 2'-O-Methyl-adenosine
  modified_base 29: mod_base = OTHER; note = 2'-O-Methyl-guanosine
  modified_base 30: mod_base = OTHER; note = 2'-O-Methyl-cytidine
  modified_base 31: mod_base = OTHER; note = 2'-O-Methyl-uridine
  modified_base 32: mod_base = OTHER; note = 2'-O-Methyl-adenosine
  modified_base 33: mod_base = OTHER; note = 2'-O-Methyl-guanosine
  modified_base 34: mod_base = OTHER; note = 2'-O-Methyl-adenosine
  modified_base 35: mod_base = OTHER; note = 2'-O-Methyl-adenosine
  modified_base 36: mod_base = OTHER; note = 2'-O-Methyl-adenosine
  modified_base 37: mod_base = OTHER; note = 2'-O-Methyl-uridine
  modified_base 38: mod_base = OTHER; note = 2'-O-Methyl-adenosine
  modified_base 39: mod_base = OTHER; note = 2'-O-Methyl-guanosine
  modified_base 40: mod_base = OTHER; note = 2'-O-Methyl-cytidine
  modified_base 41: mod_base = OTHER; note = 2'-O-Methyl-adenosine
  modified_base 42: mod_base = OTHER; note = 2'-O-Methyl-adenosine
  modified_base 45: mod_base = OTHER; note = uridine phosphorothioate
  modified_base 46: mod_base = OTHER; note = 2'-O-Methyl-adenosine
  modified_base 48: mod_base = OTHER; note = 2'-O-Methyl-adenosine
  modified_base 50: mod_base = OTHER; note = 2'-O-Methyl-uridine
  modified_base 52: mod_base = OTHER; note = 2'-O-Methyl-adenosine
  modified_base 53: mod_base = OTHER; note = 2'-O-Methyl-guanosine
  modified_base 54: mod_base = OTHER; note = 2'-O-Methyl-guanosine
  modified_base 55: mod_base = OTHER; note = 2'-O-Methyl-cytidine
  modified_base 56: mod_base = OTHER; note = 2'-O-Methyl-uridine
  modified_base 57: mod_base = OTHER; note = 2'-O-Methyl-adenosine
  modified_base 60: mod_base = OTHER; note = 2'-O-Methyl-cytidine
  modified_base 61: mod_base = OTHER; note = 2'-O-Methyl-cytidine
  modified_base 64: mod_base = OTHER; note = uridine phosphorothioate
  modified_base 66: mod_base = OTHER; note = 2'-O-Methyl-uridine
  modified_base 67: mod_base = OTHER; note = 2'-O-Methyl-cytidine
  modified_base 70: mod_base = OTHER; note = 2'-O-Methyl-cytidine
  modified_base 71: mod_base = OTHER; note = 2'-O-Methyl-uridine
  modified_base 72: mod_base = OTHER; note = 2'-O-Methyl-uridine
  modified_base 73: mod_base = OTHER; note = 2'-O-Methyl-guanosine
  modified_base 74: mod_base = OTHER; note = 2'-O-Methyl-adenosine
  modified_base 75: mod_base = OTHER; note = 2'-O-Methyl-adenosine
  modified_base 76: mod_base = OTHER; note = 2'-O-Methyl-adenosine
  modified_base 77: mod_base = OTHER; note = 2'-O-Methyl-adenosine
  modified_base 78: mod_base = OTHER; note = 2'-O-Methyl-adenosine
  modified_base 79: mod_base = OTHER; note = 2'-O-Methyl-guanosine
  modified_base 80: mod_base = OTHER; note = 2'-O-Methyl-uridine
  modified_base 81: mod_base = OTHER; note = 2'-O-Methyl-guanosine
  modified_base 83: mod_base = OTHER; note = 2'-O-Methyl-cytidine
  modified_base 84: mod_base = OTHER; note = 2'-O-Methyl-adenosine
  modified_base 85: mod_base = OTHER; note = 2'-O-Methyl-cytidine
  modified_base 86: mod_base = OTHER; note = 2'-O-Methyl-cytidine
  modified_base 87: mod_base = OTHER; note = 2'-O-Methyl-guanosine
  modified_base 88: mod_base = OTHER; note = 2'-O-Methyl-adenosine
  modified_base 89: mod_base = OTHER; note = 2'-O-Methyl-guanosine
  modified_base 90: mod_base = OTHER; note = 2'-O-Methyl-uridine
  modified_base 91: mod_base = OTHER; note = 2'-O-Methyl-cytidine
  modified_base 92: mod_base = OTHER; note = 2'-O-Methyl-guanosine
  modified_base 93: mod_base = OTHER; note = 2'-O-Methyl-guanosine
  modified_base 94: mod_base = OTHER; note = 2'-O-Methyl-uridine
  modified_base 95: mod_base = OTHER; note = 2'-O-Methyl-guanosine
  modified_base 96: mod_base = OTHER; note = 2'-O-Methyl-cytidine
  modified_base 97: mod_base = OTHER; note = 2'-O-Methyl-uridine
  modified_base 98: mod_base = OTHER; note = 2'-O-Methyl-uridine phosphorothioate
  modified_base 99: mod_base = OTHER; note = 2'-O-Methyl-uridine phosphorothioate
  modified_base 100: mod_base = OTHER; note = 2'-O-Methyl-uridine
  misc_difference 101: note = a, c, g, inosine, u, deoxyadenosine, deoxyguanosine, deoxycytidine, deoxyinosine, thymine, ribonebularine, 2'-O-methylnebularine, or 2'-deoxynebularine
  misc_difference 102: note = a, c, g, inosine, u, deoxyadenosine, deoxyguanosine, deoxycytidine, deoxyinosine, thymine, ribonebularine, 2'-O-methylnebularine, or 2'-deoxynebularine
  misc_difference 103: note = a, c, g, inosine, u, deoxyadenosine, deoxyguanosine, deoxycytidine, deoxyinosine, thymine, ribonebularine, 2'-O-methylnebularine, or 2'-deoxynebularine

SEQ ID NO: 3068 - RNA, 103 nt, synthetic construct; identical to SEQ ID NO: 1796
  source 1..103: mol_type = other RNA
  modified_base 1: mod_base = OTHER; note = 2'-O-Methyl-guanosine phosphorothioate
  modified_base 2: mod_base = OTHER; note = 2'-O-Methyl-adenosine phosphorothioate
  modified_base 3: mod_base = OTHER; note = 2'-O-Methyl-guanosine
  modified_base 21: mod_base = OTHER; note = 2'-O-Methyl-guanosine
  modified_base 28: mod_base = OTHER; note = 2'-O-Methyl-adenosine
  modified_base 29: mod_base = OTHER; note = 2'-O-Methyl-guanosine
  modified_base 30: mod_base = OTHER; note = 2'-O-Methyl-cytidine
  modified_base 31: mod_base = OTHER; note = 2'-O-Methyl-uridine
  modified_base 32: mod_base = OTHER; note = 2'-O-Methyl-adenosine
  modified_base 34: mod_base = OTHER; note = 2'-O-Methyl-adenosine
  modified_base 35: mod_base = OTHER; note = 2'-O-Methyl-adenosine
  modified_base 36: mod_base = OTHER; note = 2'-O-Methyl-adenosine
  modified_base 37: mod_base = OTHER; note = 2'-O-Methyl-uridine
  modified_base 38: mod_base = OTHER; note = 2'-O-Methyl-adenosine
  modified_base 39: mod_base = OTHER; note = 2'-O-Methyl-guanosine
  modified_base 40: mod_base = OTHER; note = 2'-O-Methyl-cytidine
  modified_base 41: mod_base = OTHER; note = 2'-O-Methyl-adenosine
  modified_base 42: mod_base = OTHER; note = 2'-O-Methyl-adenosine
  modified_base 45: mod_base = OTHER; note = uridine phosphorothioate
  modified_base 46: mod_base = OTHER; note = 2'-O-Methyl-adenosine
  modified_base 48: mod_base = OTHER; note = 2'-O-Methyl-adenosine
  modified_base 50: mod_base = OTHER; note = 2'-O-Methyl-uridine
  modified_base 52: mod_base = OTHER; note = 2'-O-Methyl-adenosine
  modified_base 53: mod_base = OTHER; note = 2'-O-Methyl-guanosine
  modified_base 54: mod_base = OTHER; note = 2'-O-Methyl-guanosine
  modified_base 55: mod_base = OTHER; note = 2'-O-Methyl-cytidine
  modified_base 56: mod_base = OTHER; note = 2'-O-Methyl-uridine
  modified_base 57: mod_base = OTHER; note = 2'-O-Methyl-adenosine
  modified_base 60: mod_base = OTHER; note = 2'-O-Methyl-cytidine
  modified_base 61: mod_base = OTHER; note = 2'-O-Methyl-cytidine
  modified_base 64: mod_base = OTHER; note = uridine phosphorothioate
  modified_base 66: mod_base = OTHER; note = 2'-O-Methyl-uridine
  modified_base 67: mod_base = OTHER; note = 2'-O-Methyl-cytidine
  modified_base 70: mod_base = OTHER; note = 2'-O-Methyl-cytidine
  modified_base 71: mod_base = OTHER; note = 2'-O-Methyl-uridine
  modified_base 72: mod_base = OTHER; note = 2'-O-Methyl-uridine
  modified_base 74: mod_base = OTHER; note = 2'-O-Methyl-adenosine
  modified_base 75: mod_base = OTHER; note = 2'-O-Methyl-adenosine
  modified_base 76: mod_base = OTHER; note = 2'-O-Methyl-adenosine
  modified_base 77: mod_base = OTHER; note = 2'-O-Methyl-adenosine
  modified_base 78: mod_base = OTHER; note = 2'-O-Methyl-adenosine
  modified_base 79: mod_base = OTHER; note = 2'-O-Methyl-guanosine
  modified_base 80: mod_base = OTHER; note = 2'-O-Methyl-uridine
  modified_base 81: mod_base = OTHER; note = 2'-O-Methyl-guanosine
  modified_base 83: mod_base = OTHER; note = 2'-O-Methyl-cytidine
  modified_base 84: mod_base = OTHER; note = 2'-O-Methyl-adenosine
  modified_base 85: mod_base = OTHER; note = 2'-O-Methyl-cytidine
  modified_base 86: mod_base = OTHER; note = 2'-O-Methyl-cytidine
  modified_base 87: mod_base = OTHER; note = 2'-O-Methyl-guanosine
  modified_base 88: mod_base = OTHER; note = 2'-O-Methyl-adenosine
  modified_base 89: mod_base = OTHER; note = 2'-O-Methyl-guanosine
  modified_base 90: mod_base = OTHER; note = 2'-O-Methyl-uridine
  modified_base 91: mod_base = OTHER; note = 2'-O-Methyl-cytidine
  modified_base 92: mod_base = OTHER; note = 2'-O-Methyl-guanosine
  modified_base 93: mod_base = OTHER; note = 2'-O-Methyl-guanosine
  modified_base 94: mod_base = OTHER; note = 2'-O-Methyl-uridine
  modified_base 95: mod_base = OTHER; note = 2'-O-Methyl-guanosine
  modified_base 96: mod_base = OTHER; note = 2'-O-Methyl-cytidine
  modified_base 97: mod_base = OTHER; note = 2'-O-Methyl-uridine
  modified_base 98: mod_base = OTHER; note = 2'-O-Methyl-uridine phosphorothioate
  modified_base 99: mod_base = OTHER; note = 2'-O-Methyl-uridine phosphorothioate
  modified_base 100: mod_base = OTHER; note = 2'-O-Methyl-uridine
  misc_difference 101: note = a, c, g, inosine, u, deoxyadenosine, deoxyguanosine, deoxycytidine, deoxyinosine, thymine, ribonebularine, 2'-O-methylnebularine, or 2'-deoxynebularine
  misc_difference 102: note = a, c, g, inosine, u, deoxyadenosine, deoxyguanosine, deoxycytidine, deoxyinosine, thymine, ribonebularine, 2'-O-methylnebularine, or 2'-deoxynebularine
  misc_difference 103: note = a, c, g, inosine, u, deoxyadenosine, deoxyguanosine, deoxycytidine, deoxyinosine, thymine, ribonebularine, 2'-O-methylnebularine, or 2'-deoxynebularine

SEQ ID NO: 3069 - RNA, 103 nt, synthetic construct; identical to SEQ ID NO: 1797
  source 1..103: mol_type = other RNA
  modified_base 1: mod_base = OTHER; note = 2'-O-Methyl-cytidine phosphorothioate
  modified_base 2: mod_base = OTHER; note = 2'-O-Methyl-adenosine phosphorothioate
  modified_base 3: mod_base = OTHER; note = 2'-O-Methyl-guanosine
  modified_base 21: mod_base = OTHER; note = 2'-O-Methyl-guanosine
  modified_base 28: mod_base = OTHER; note = 2'-O-Methyl-adenosine
  modified_base 29: mod_base = OTHER; note = 2'-O-Methyl-guanosine
  modified_base 30: mod_base = OTHER; note = 2'-O-Methyl-cytidine
  modified_base 31: mod_base = OTHER; note = 2'-O-Methyl-uridine
  modified_base 32: mod_base = OTHER; note = 2'-O-Methyl-adenosine
  modified_base 33: mod_base = OTHER; note = 2'-O-Methyl-guanosine
  modified_base 34: mod_base = OTHER; note = 2'-O-Methyl-adenosine
  modified_base 35: mod_base = OTHER; note = 2'-O-Methyl-adenosine
  modified_base 36: mod_base = OTHER; note = 2'-O-Methyl-adenosine
  modified_base 37: mod_base = OTHER; note = 2'-O-Methyl-uridine
  modified_base 38: mod_base = OTHER; note = 2'-O-Methyl-adenosine
  modified_base 39: mod_base = OTHER; note = 2'-O-Methyl-guanosine
  modified_base 40: mod_base = OTHER; note = 2'-O-Methyl-cytidine
  modified_base 41: mod_base = OTHER; note = 2'-O-Methyl-adenosine
  modified_base 42: mod_base = OTHER; note = 2'-O-Methyl-adenosine
  modified_base 45: mod_base = OTHER; note = uridine phosphorothioate
  modified_base 46: mod_base = OTHER; note = 2'-O-Methyl-adenosine
  modified_base 48: mod_base = OTHER; note = 2'-O-Methyl-adenosine
  modified_base 50: mod_base = OTHER; note = 2'-O-Methyl-uridine
  modified_base 52: mod_base = OTHER; note = 2'-O-Methyl-adenosine
  modified_base 53: mod_base = OTHER; note = 2'-O-Methyl-guanosine
  modified_base 54: mod_base = OTHER; note = 2'-O-Methyl-guanosine
  modified_base 57: mod_base = OTHER; note = 2'-O-Methyl-adenosine
  modified_base 61: mod_base = OTHER; note = 2'-O-Methyl-cytidine
  modified_base 64: mod_base = OTHER; note = uridine phosphorothioate
  modified_base 66: mod_base = OTHER; note = 2'-O-Methyl-uridine
  modified_base 67: mod_base = OTHER; note = 2'-O-Methyl-cytidine
  modified_base 70: mod_base = OTHER; note = 2'-O-Methyl-cytidine
  modified_base 71: mod_base = OTHER; note = 2'-O-Methyl-uridine
  modified_base 72: mod_base = OTHER; note = 2'-O-Methyl-uridine
  modified_base 74: mod_base = OTHER; note = 2'-O-Methyl-adenosine
  modified_base 75: mod_base = OTHER; note = 2'-O-Methyl-adenosine
  modified_base 76: mod_base = OTHER; note = 2'-O-Methyl-adenosine
  modified_base 77: mod_base = OTHER; note = 2'-O-Methyl-adenosine
  modified_base 78: mod_base = OTHER; note = 2'-O-Methyl-adenosine
  modified_base 79: mod_base = OTHER; note = 2'-O-Methyl-guanosine
  modified_base 80: mod_base = OTHER; note = 2'-O-Methyl-uridine
  modified_base 82: mod_base = OTHER; note = 2'-O-Methyl-guanosine
  modified_base 83: mod_base = OTHER; note = 2'-O-Methyl-cytidine
  modified_base 84: mod_base = OTHER; note = 2'-O-Methyl-adenosine
  modified_base 85: mod_base = OTHER; note = 2'-O-Methyl-cytidine
  modified_base 86: mod_base = OTHER; note = 2'-O-Methyl-cytidine
  modified_base 87: mod_base = OTHER; note = 2'-O-Methyl-guanosine
  modified_base 89: mod_base = OTHER; note = 2'-O-Methyl-guanosine
  modified_base 92: mod_base = OTHER; note = 2'-O-Methyl-guanosine
  modified_base 93: mod_base = OTHER; note = 2'-O-Methyl-guanosine
  modified_base 94: mod_base = OTHER; note = 2'-O-Methyl-uridine
  modified_base 95: mod_base = OTHER; note = 2'-O-Methyl-guanosine
  modified_base 96: mod_base = OTHER; note = 2'-O-Methyl-cytidine
  modified_base 97: mod_base = OTHER; note = 2'-O-Methyl-uridine
  modified_base 98: mod_base = OTHER; note = 2'-O-Methyl-uridine phosphorothioate
  modified_base 99: mod_base = OTHER; note = 2'-O-Methyl-uridine phosphorothioate
  modified_base 100: mod_base = OTHER; note = 2'-O-Methyl-uridine
  misc_difference 101: note = a, c, g, inosine, u, deoxyadenosine, deoxyguanosine, deoxycytidine, deoxyinosine, thymine, ribonebularine, 2'-O-methylnebularine, or 2'-deoxynebularine
  misc_difference 102: note = a, c, g, inosine, u, deoxyadenosine, deoxyguanosine, deoxycytidine, deoxyinosine, thymine, ribonebularine, 2'-O-methylnebularine, or 2'-deoxynebularine
  misc_difference 103: note = a, c, g, inosine, u, deoxyadenosine, deoxyguanosine, deoxycytidine, deoxyinosine, thymine, ribonebularine, 2'-O-methylnebularine, or 2'-deoxynebularine

SEQ ID NO: 3070 - RNA, 103 nt, synthetic construct; identical to SEQ ID NO: 1797
  source 1..103: mol_type = other RNA
  modified_base 1: mod_base = OTHER; note = 2'-O-Methyl-cytidine phosphorothioate
  modified_base 2: mod_base = OTHER; note = 2'-O-Methyl-adenosine phosphorothioate
  modified_base 3: mod_base = OTHER; note = 2'-O-Methyl-guanosine
  modified_base 21: mod_base = OTHER; note = 2'-O-Methyl-guanosine
  modified_base 28: mod_base = OTHER; note = 2'-O-Methyl-adenosine
  modified_base 29: mod_base = OTHER; note = 2'-O-Methyl-guanosine
  modified_base 30: mod_base = OTHER; note = 2'-O-Methyl-cytidine
  modified_base 31: mod_base = OTHER; note = 2'-O-Methyl-uridine
  modified_base 32: mod_base = OTHER; note = 2'-O-Methyl-adenosine
  modified_base 33: mod_base = OTHER; note = 2'-O-Methyl-guanosine
  modified_base 34: mod_base = OTHER; note = 2'-O-Methyl-adenosine
  modified_base 35: mod_base = OTHER; note = 2'-O-Methyl-adenosine
  modified_base 36: mod_base = OTHER; note = 2'-O-Methyl-adenosine
  modified_base 37: mod_base = OTHER; note = 2'-O-Methyl-uridine
  modified_base 38: mod_base = OTHER; note = 2'-O-Methyl-adenosine
  modified_base 39: mod_base = OTHER; note = 2'-O-Methyl-guanosine
  modified_base 40: mod_base = OTHER; note = 2'-O-Methyl-cytidine
  modified_base 41: mod_base = OTHER; note = 2'-O-Methyl-adenosine
  modified_base 42: mod_base = OTHER; note = 2'-O-Methyl-adenosine
  modified_base 45: mod_base = OTHER; note = uridine phosphorothioate
  modified_base 46: mod_base = OTHER; note = 2'-O-Methyl-adenosine
  modified_base 48: mod_base = OTHER; note = 2'-O-Methyl-adenosine
  modified_base 50: mod_base = OTHER; note = 2'-O-Methyl-uridine
  modified_base 52: mod_base = OTHER; note = 2'-O-Methyl-adenosine
  modified_base 53: mod_base = OTHER; note = 2'-O-Methyl-guanosine
  modified_base 54: mod_base = OTHER; note = 2'-O-Methyl-guanosine
  modified_base 55: mod_base = OTHER; note = 2'-O-Methyl-cytidine
  modified_base 56: mod_base = OTHER; note = 2'-O-Methyl-uridine
  modified_base 57: mod_base = OTHER; note = 2'-O-Methyl-adenosine
  modified_base 60: mod_base = OTHER; note = 2'-O-Methyl-cytidine
  modified_base 61: mod_base = OTHER; note = 2'-O-Methyl-cytidine
  modified_base 64: mod_base = OTHER; note = uridine phosphorothioate
  modified_base 66: mod_base = OTHER; note = 2'-O-Methyl-uridine
  modified_base 67: mod_base = OTHER; note = 2'-O-Methyl-cytidine
  modified_base 70: mod_base = OTHER; note = 2'-O-Methyl-cytidine
  modified_base 71: mod_base = OTHER; note = 2'-O-Methyl-uridine
  modified_base 72: mod_base = OTHER; note = 2'-O-Methyl-uridine
  modified_base 74: mod_base = OTHER; note = 2'-O-Methyl-adenosine
  modified_base 75: mod_base = OTHER; note = 2'-O-Methyl-adenosine
  modified_base 76: mod_base = OTHER; note = 2'-O-Methyl-adenosine
  modified_base 77: mod_base = OTHER; note = 2'-O-Methyl-adenosine
  modified_base 78: mod_base = OTHER; note = 2'-O-Methyl-adenosine
  modified_base 79: mod_base = OTHER; note = 2'-O-Methyl-guanosine
  modified_base 80: mod_base = OTHER; note = 2'-O-Methyl-uridine
  modified_base 82: mod_base = OTHER; note = 2'-O-Methyl-guanosine
  modified_base 83: mod_base = OTHER; note = 2'-O-Methyl-cytidine
  modified_base 84: mod_base = OTHER; note = 2'-O-Methyl-adenosine
  modified_base 85: mod_base = OTHER; note = 2'-O-Methyl-cytidine
  modified_base 86: mod_base = OTHER; note = 2'-O-Methyl-cytidine
  modified_base 87: mod_base = OTHER; note = 2'-O-Methyl-guanosine
  modified_base 89: mod_base = OTHER; note = 2'-O-Methyl-guanosine
  modified_base 92: mod_base = OTHER; note = 2'-O-Methyl-guanosine
  modified_base 93: mod_base = OTHER; note = 2'-O-Methyl-guanosine
  modified_base 94: mod_base = OTHER; note = 2'-O-Methyl-uridine
  modified_base 95: mod_base = OTHER; note = 2'-O-Methyl-guanosine
  modified_base 96: mod_base = OTHER; note = 2'-O-Methyl-cytidine
  modified_base 97: mod_base = OTHER; note = 2'-O-Methyl-uridine
  modified_base 98: mod_base = OTHER; note = 2'-O-Methyl-uridine phosphorothioate
  modified_base 99: mod_base = OTHER; note = 2'-O-Methyl-uridine phosphorothioate
  modified_base 100: mod_base = OTHER; note = 2'-O-Methyl-uridine
  misc_difference 101: note = a, c, g, inosine, u, deoxyadenosine, deoxyguanosine, deoxycytidine, deoxyinosine, thymine, ribonebularine, 2'-O-methylnebularine, or 2'-deoxynebularine
  misc_difference 102: note = a, c, g, inosine, u, deoxyadenosine, deoxyguanosine, deoxycytidine, deoxyinosine, thymine, ribonebularine, 2'-O-methylnebularine, or 2'-deoxynebularine
  misc_difference 103: note = a, c, g, inosine, u, deoxyadenosine, deoxyguanosine, deoxycytidine, deoxyinosine, thymine, ribonebularine, 2'-O-methylnebularine, or 2'-deoxynebularine

SEQ ID NO: 3071 - RNA, 103 nt, synthetic construct; identical to SEQ ID NO: 1797
  source 1..103: mol_type = other RNA
  modified_base 1: mod_base = OTHER; note = 2'-O-Methyl-cytidine phosphorothioate
  modified_base 2: mod_base = OTHER; note = 2'-O-Methyl-adenosine phosphorothioate
  modified_base 3: mod_base = OTHER; note = 2'-O-Methyl-guanosine
  modified_base 21: mod_base = OTHER; note = 2'-O-Methyl-guanosine
  modified_base 28: mod_base = OTHER; note = 2'-O-Methyl-adenosine
  modified_base 29: mod_base = OTHER; note = 2'-O-Methyl-guanosine
  modified_base 30: mod_base = OTHER; note = 2'-O-Methyl-cytidine
  modified_base 31: mod_base = OTHER; note = 2'-O-Methyl-uridine
  modified_base 32: mod_base = OTHER; note = 2'-O-Methyl-adenosine
  modified_base 33: mod_base = OTHER; note = 2'-O-Methyl-guanosine
  modified_base 34: mod_base = OTHER; note = 2'-O-Methyl-adenosine
  modified_base 35: mod_base = OTHER; note = 2'-O-Methyl-adenosine
  modified_base 36: mod_base = OTHER; note = 2'-O-Methyl-adenosine
  modified_base 37: mod_base = OTHER; note = 2'-O-Methyl-uridine
  modified_base 38: mod_base = OTHER; note = 2'-O-Methyl-adenosine
  modified_base 39: mod_base = OTHER; note = 2'-O-Methyl-guanosine
  modified_base 40: mod_base = OTHER; note = 2'-O-Methyl-cytidine
  modified_base 41: mod_base = OTHER; note = 2'-O-Methyl-adenosine
  modified_base 42: mod_base = OTHER; note = 2'-O-Methyl-adenosine
  modified_base 45: mod_base = OTHER; note = uridine phosphorothioate
  modified_base 46: mod_base = OTHER; note = 2'-O-Methyl-adenosine
  modified_base 48: mod_base = OTHER; note = 2'-O-Methyl-adenosine
  modified_base 50: mod_base = OTHER; note = 2'-O-Methyl-uridine
  modified_base 52: mod_base = OTHER; note = 2'-O-Methyl-adenosine
  modified_base 53: mod_base = OTHER; note = 2'-O-Methyl-guanosine
  modified_base 54: mod_base = OTHER; note = 2'-O-Methyl-guanosine
  modified_base 57: mod_base = OTHER; note = 2'-O-Methyl-adenosine
  modified_base 61: mod_base = OTHER; note = 2'-O-Methyl-cytidine
  modified_base 64: mod_base = OTHER; note = uridine phosphorothioate
  modified_base 66: mod_base = OTHER; note = 2'-O-Methyl-uridine
  modified_base 67: mod_base = OTHER; note = 2'-O-Methyl-cytidine
  modified_base 70: mod_base = OTHER; note = 2'-O-Methyl-cytidine
  modified_base 71: mod_base = OTHER; note = 2'-O-Methyl-uridine
  modified_base 72: mod_base = OTHER; note = 2'-O-Methyl-uridine
  modified_base 73: mod_base = OTHER; note = 2'-O-Methyl-guanosine
  modified_base 74: mod_base = OTHER; note = 2'-O-Methyl-adenosine
  modified_base 75: mod_base = OTHER; note = 2'-O-Methyl-adenosine
  modified_base 76: mod_base = OTHER; note = 2'-O-Methyl-adenosine
  modified_base 77: mod_base = OTHER; note = 2'-O-Methyl-adenosine
  modified_base 78: mod_base = OTHER; note = 2'-O-Methyl-adenosine
  modified_base 79: mod_base = OTHER; note = 2'-O-Methyl-guanosine
  modified_base 80: mod_base = OTHER; note = 2'-O-Methyl-uridine
  modified_base 82: mod_base = OTHER; note = 2'-O-Methyl-guanosine
  modified_base 83: mod_base = OTHER; note = 2'-O-Methyl-cytidine
  modified_base 84: mod_base = OTHER; note = 2'-O-Methyl-adenosine
  modified_base 85: mod_base = OTHER; note = 2'-O-Methyl-cytidine
  modified_base 86: mod_base = OTHER; note = 2'-O-Methyl-cytidine
  modified_base 87: mod_base = OTHER; note = 2'-O-Methyl-guanosine
  modified_base 89: mod_base = OTHER; note = 2'-O-Methyl-guanosine
  modified_base 92: mod_base = OTHER; note = 2'-O-Methyl-guanosine
  modified_base 93: mod_base = OTHER; note = 2'-O-Methyl-guanosine
  modified_base 94: mod_base = OTHER; note = 2'-O-Methyl-uridine
  modified_base 95: mod_base = OTHER; note = 2'-O-Methyl-guanosine
  modified_base 96: mod_base = OTHER; note = 2'-O-Methyl-cytidine
  modified_base 97: mod_base = OTHER; note = 2'-O-Methyl-uridine
  modified_base 98: mod_base = OTHER; note = 2'-O-Methyl-uridine phosphorothioate
  modified_base 99: mod_base = OTHER; note = 2'-O-Methyl-uridine phosphorothioate
  modified_base 100: mod_base = OTHER; note = 2'-O-Methyl-uridine
  misc_difference 101: note = a, c, g, inosine, u, deoxyadenosine, deoxyguanosine, deoxycytidine, deoxyinosine, thymine, ribonebularine, 2'-O-methylnebularine, or 2'-deoxynebularine
  misc_difference 102: note = a, c, g, inosine, u, deoxyadenosine, deoxyguanosine, deoxycytidine, deoxyinosine, thymine, ribonebularine, 2'-O-methylnebularine, or 2'-deoxynebularine
  misc_difference 103: note = a, c, g, inosine, u, deoxyadenosine, deoxyguanosine, deoxycytidine, deoxyinosine, thymine, ribonebularine, 2'-O-methylnebularine, or 2'-deoxynebularine

SEQ ID NO: 3072 - RNA, 103 nt, synthetic construct; identical to SEQ ID NO: 1797
  source 1..103: mol_type = other RNA
  modified_base 1: mod_base = OTHER; note = 2'-O-Methyl-cytidine phosphorothioate
  modified_base 2: mod_base = OTHER; note = 2'-O-Methyl-adenosine phosphorothioate
  modified_base 3: mod_base = OTHER; note = 2'-O-Methyl-guanosine
  modified_base 21: mod_base = OTHER; note = 2'-O-Methyl-guanosine
  modified_base 28: mod_base = OTHER; note = 2'-O-Methyl-adenosine
  modified_base 29: mod_base = OTHER; note = 2'-O-Methyl-guanosine
  modified_base 30: mod_base = OTHER; note = 2'-O-Methyl-cytidine
  modified_base 31: mod_base = OTHER; note = 2'-O-Methyl-uridine
  modified_base 32: mod_base = OTHER; note = 2'-O-Methyl-adenosine
  modified_base 34: mod_base = OTHER; note = 2'-O-Methyl-adenosine
  modified_base 35: mod_base = OTHER; note = 2'-O-Methyl-adenosine
  modified_base 36: mod_base = OTHER; note = 2'-O-Methyl-adenosine
  modified_base 37: mod_base = OTHER; note = 2'-O-Methyl-uridine
  modified_base 38: mod_base = OTHER; note = 2'-O-Methyl-adenosine
  modified_base 39: mod_base = OTHER; note = 2'-O-Methyl-guanosine
  modified_base 40: mod_base = OTHER; note = 2'-O-Methyl-cytidine
  modified_base 41: mod_base = OTHER; note = 2'-O-Methyl-adenosine
  modified_base 42: mod_base = OTHER; note = 2'-O-Methyl-adenosine
  modified_base 45: mod_base = OTHER; note = uridine phosphorothioate
  modified_base 46: mod_base = OTHER; note = 2'-O-Methyl-adenosine
  modified_base 48: mod_base = OTHER; note = 2'-O-Methyl-adenosine
  modified_base 50: mod_base = OTHER; note = 2'-O-Methyl-uridine
  modified_base 52: mod_base = OTHER; note = 2'-O-Methyl-adenosine
  modified_base 53: mod_base = OTHER; note = 2'-O-Methyl-guanosine
  modified_base 54: mod_base = OTHER; note = 2'-O-Methyl-guanosine
  modified_base 57: mod_base = OTHER; note = 2'-O-Methyl-adenosine
  modified_base 61: mod_base = OTHER; note = 2'-O-Methyl-cytidine
  modified_base 64: mod_base = OTHER; note = uridine phosphorothioate
  modified_base 66: mod_base = OTHER; note = 2'-O-Methyl-uridine
  modified_base 67: mod_base = OTHER; note = 2'-O-Methyl-cytidine
  modified_base 70: mod_base = OTHER; note = 2'-O-Methyl-cytidine
  modified_base 71: mod_base = OTHER; note = 2'-O-Methyl-uridine
  modified_base 72: mod_base = OTHER; note = 2'-O-Methyl-uridine
  modified_base 73: mod_base = OTHER; note = 2'-O-Methyl-guanosine
  modified_base 74: mod_base = OTHER; note = 2'-O-Methyl-adenosine
  modified_base 75: mod_base = OTHER; note = 2'-O-Methyl-adenosine
  modified_base 76: mod_base = OTHER; note = 2'-O-Methyl-adenosine
  modified_base 77: mod_base = OTHER; note = 2'-O-Methyl-adenosine
  modified_base 78: mod_base = OTHER; note = 2'-O-Methyl-adenosine
  modified_base 79: mod_base = OTHER; note = 2'-O-Methyl-guanosine
  modified_base 80: mod_base = OTHER; note = 2'-O-Methyl-uridine
  modified_base 82: mod_base = OTHER; note = 2'-O-Methyl-guanosine
  modified_base 83: mod_base = OTHER; note = 2'-O-Methyl-cytidine
  modified_base 84: mod_base = OTHER; note = 2'-O-Methyl-adenosine
  modified_base 85: mod_base = OTHER; note = 2'-O-Methyl-cytidine
  modified_base 86: mod_base = OTHER; note = 2'-O-Methyl-cytidine
  modified_base 87: mod_base = OTHER; note = 2'-O-Methyl-guanosine
  modified_base 89: mod_base = OTHER; note = 2'-O-Methyl-guanosine
  modified_base 92: mod_base = OTHER; note = 2'-O-Methyl-guanosine
  modified_base 93: mod_base = OTHER; note = 2'-O-Methyl-guanosine
  modified_base 94: mod_base = OTHER; note = 2'-O-Methyl-uridine
  modified_base 95: mod_base = OTHER; note = 2'-O-Methyl-guanosine
  modified_base 96: mod_base = OTHER; note = 2'-O-Methyl-cytidine
  modified_base 97: mod_base = OTHER; note = 2'-O-Methyl-uridine
  modified_base 98: mod_base = OTHER; note = 2'-O-Methyl-uridine phosphorothioate
  modified_base 99: mod_base = OTHER; note = 2'-O-Methyl-uridine phosphorothioate
  modified_base 100: mod_base = OTHER; note = 2'-O-Methyl-uridine
  misc_difference 101: note = a, c, g, inosine, u, deoxyadenosine, deoxyguanosine, deoxycytidine, deoxyinosine, thymine, ribonebularine, 2'-O-methylnebularine, or 2'-deoxynebularine
  misc_difference 102: note = a, c, g, inosine, u, deoxyadenosine, deoxyguanosine, deoxycytidine, deoxyinosine, thymine, ribonebularine, 2'-O-methylnebularine, or 2'-deoxynebularine
  misc_difference 103: note = a, c, g, inosine, u, deoxyadenosine, deoxyguanosine, deoxycytidine, deoxyinosine, thymine, ribonebularine, 2'-O-methylnebularine, or 2'-deoxynebularine

SEQ ID NO: 3073 - RNA, 103 nt, synthetic construct; identical to SEQ ID NO: 1797
  source 1..103: mol_type = other RNA
  modified_base 1: mod_base = OTHER; note = 2'-O-Methyl-cytidine phosphorothioate
  modified_base 2: mod_base = OTHER; note = 2'-O-Methyl-adenosine phosphorothioate
  modified_base 3: mod_base = OTHER; note = 2'-O-Methyl-guanosine
  modified_base 21: mod_base = OTHER; note = 2'-O-Methyl-guanosine
  modified_base 28: mod_base = OTHER; note = 2'-O-Methyl-adenosine
  modified_base 29: mod_base = OTHER; note = 2'-O-Methyl-guanosine
  modified_base 30: mod_base = OTHER; note = 2'-O-Methyl-cytidine
  modified_base 31: mod_base = OTHER; note = 2'-O-Methyl-uridine
  modified_base 32: mod_base = OTHER; note = 2'-O-Methyl-adenosine
  modified_base 34: mod_base = OTHER; note = 2'-O-Methyl-adenosine
  modified_base 35: mod_base = OTHER; note = 2'-O-Methyl-adenosine
  modified_base 36: mod_base = OTHER; note = 2'-O-Methyl-adenosine
  modified_base 37: mod_base = OTHER; note = 2'-O-Methyl-uridine
  modified_base 38: mod_base = OTHER; note = 2'-O-Methyl-adenosine
  modified_base 39: mod_base = OTHER; note = 2'-O-Methyl-guanosine
  modified_base 40: mod_base = OTHER; note = 2'-O-Methyl-cytidine
  modified_base 41: mod_base = OTHER; note = 2'-O-Methyl-adenosine
  modified_base 42: mod_base = OTHER; note = 2'-O-Methyl-adenosine
  modified_base 45: mod_base = OTHER; note = uridine phosphorothioate
  modified_base 46: mod_base = OTHER; note = 2'-O-Methyl-adenosine
  modified_base 48: mod_base = OTHER; note = 2'-O-Methyl-adenosine
  modified_base 50: mod_base = OTHER; note = 2'-O-Methyl-uridine
  modified_base 52: mod_base = OTHER; note = 2'-O-Methyl-adenosine
  modified_base 53: mod_base = OTHER; note = 2'-O-Methyl-guanosine
  modified_base 54: mod_base = OTHER; note = 2'-O-Methyl-guanosine
  modified_base 57: mod_base = OTHER; note = 2'-O-Methyl-adenosine
  modified_base 61: mod_base = OTHER; note = 2'-O-Methyl-cytidine
  modified_base 64: mod_base = OTHER; note = uridine phosphorothioate
  modified_base 66: mod_base = OTHER; note = 2'-O-Methyl-uridine
  modified_base 67: mod_base = OTHER; note = 2'-O-Methyl-cytidine
  modified_base 70: mod_base = OTHER; note = 2'-O-Methyl-cytidine
  modified_base 71: mod_base = OTHER; note = 2'-O-Methyl-uridine
  modified_base 72: mod_base = OTHER; note = 2'-O-Methyl-uridine
  modified_base 73: mod_base = OTHER; note = 2'-O-Methyl-guanosine
  modified_base 74: mod_base = OTHER; note = 2'-O-Methyl-adenosine
  modified_base 75: mod_base = OTHER; note = 2'-O-Methyl-adenosine
  modified_base 76: mod_base = OTHER; note = 2'-O-Methyl-adenosine
  modified_base 77: mod_base = OTHER; note = 2'-O-Methyl-adenosine
  modified_base 78: mod_base = OTHER; note = 2'-O-Methyl-adenosine
  modified_base 79: mod_base = OTHER; note = 2'-O-Methyl-guanosine
  modified_base 80: mod_base = OTHER; note = 2'-O-Methyl-uridine
  modified_base 82: mod_base = OTHER; note = 2'-O-Methyl-guanosine
  modified_base 83: mod_base = OTHER; note = 2'-O-Methyl-cytidine
  modified_base 84: mod_base = OTHER; note = 2'-O-Methyl-adenosine
  modified_base 85: mod_base = OTHER; note = 2'-O-Methyl-cytidine
  modified_base 86: mod_base = OTHER; note = 2'-O-Methyl-cytidine
  modified_base 87: mod_base = OTHER; note = 2'-O-Methyl-guanosine
  modified_base 89: mod_base = OTHER; note = 2'-O-Methyl-guanosine
  modified_base 91: mod_base = OTHER; note = 2'-O-Methyl-cytidine
  modified_base 92: mod_base = OTHER; note = 2'-O-Methyl-guanosine
  modified_base 93: mod_base = OTHER; note = 2'-O-Methyl-guanosine
  modified_base 94: mod_base = OTHER; note = 2'-O-Methyl-uridine
  modified_base 95: mod_base = OTHER; note = 2'-O-Methyl-guanosine
  modified_base 96: mod_base = OTHER; note = 2'-O-Methyl-cytidine
  modified_base 97: mod_base = OTHER; note = 2'-O-Methyl-uridine
  modified_base 98: mod_base = OTHER; note = 2'-O-Methyl-uridine phosphorothioate
  modified_base 99: mod_base = OTHER; note = 2'-O-Methyl-uridine phosphorothioate
  modified_base 100: mod_base = OTHER; note = 2'-O-Methyl-uridine
  misc_difference 101: note = a, c, g, inosine, u, deoxyadenosine, deoxyguanosine, deoxycytidine, deoxyinosine, thymine, ribonebularine, 2'-O-methylnebularine, or 2'-deoxynebularine
  misc_difference 102: note = a, c, g, inosine, u, deoxyadenosine, deoxyguanosine, deoxycytidine, deoxyinosine, thymine, ribonebularine, 2'-O-methylnebularine, or 2'-deoxynebularine
  misc_difference 103: note = a, c, g, inosine, u, deoxyadenosine, deoxyguanosine, deoxycytidine, deoxyinosine, thymine, ribonebularine, 2'-O-methylnebularine, or 2'-deoxynebularine

SEQ ID NO: 3074 - RNA, 103 nt, synthetic construct; identical to SEQ ID NO: 1797
  source 1..103: mol_type = other RNA
  modified_base 1: mod_base = OTHER; note = 2'-O-Methyl-cytidine phosphorothioate
  modified_base 2: mod_base = OTHER; note = 2'-O-Methyl-adenosine phosphorothioate
  modified_base 3: mod_base = OTHER; note = 2'-O-Methyl-guanosine
  modified_base 21: mod_base = OTHER; note = 2'-O-Methyl-guanosine
  modified_base 28: mod_base = OTHER; note = 2'-O-Methyl-adenosine
  modified_base 29: mod_base = OTHER; note = 2'-O-Methyl-guanosine
  modified_base 30: mod_base = OTHER; note = 2'-O-Methyl-cytidine
  modified_base 31: mod_base = OTHER; note = 2'-O-Methyl-uridine
  modified_base 32: mod_base = OTHER; note = 2'-O-Methyl-adenosine
  modified_base 34: mod_base = OTHER; note = 2'-O-Methyl-adenosine
  modified_base 35: mod_base = OTHER; note = 2'-O-Methyl-adenosine
  modified_base 36: mod_base = OTHER; note = 2'-O-Methyl-adenosine
  modified_base 37: mod_base = OTHER; note = 2'-O-Methyl-uridine
  modified_base 38: mod_base = OTHER; note = 2'-O-Methyl-adenosine
  modified_base 39: mod_base = OTHER; note = 2'-O-Methyl-guanosine
  modified_base 40: mod_base = OTHER; note = 2'-O-Methyl-cytidine
  modified_base 41: mod_base = OTHER; note = 2'-O-Methyl-adenosine
  modified_base 42: mod_base = OTHER; note = 2'-O-Methyl-adenosine
  modified_base 45: mod_base = OTHER; note = uridine phosphorothioate
  modified_base 46: mod_base = OTHER; note = 2'-O-Methyl-adenosine
  modified_base 48: mod_base = OTHER; note = 2'-O-Methyl-adenosine
  modified_base 50: mod_base = OTHER; note = 2'-O-Methyl-uridine
  modified_base 52: mod_base = OTHER; note = 2'-O-Methyl-adenosine
  modified_base 53: mod_base = OTHER; note = 2'-O-Methyl-guanosine
  modified_base 54: mod_base = OTHER; note = 2'-O-Methyl-guanosine
  modified_base 55: mod_base = OTHER; note = 2'-O-Methyl-cytidine
  modified_base 56: mod_base = OTHER; note = 2'-O-Methyl-uridine
  modified_base 57: mod_base = OTHER; note = 2'-O-Methyl-adenosine
  modified_base 60: mod_base = OTHER; note = 2'-O-Methyl-cytidine
  modified_base 61: mod_base = OTHER; note = 2'-O-Methyl-cytidine
  modified_base 64: mod_base = OTHER; note = uridine phosphorothioate
  modified_base 66: mod_base = OTHER; note = 2'-O-Methyl-uridine
  modified_base 67: mod_base = OTHER; note = 2'-O-Methyl-cytidine
  modified_base 70: mod_base = OTHER; note = 2'-O-Methyl-cytidine
  modified_base 71: mod_base = OTHER; note = 2'-O-Methyl-uridine
  modified_base 72: mod_base = OTHER; note = 2'-O-Methyl-uridine
  modified_base 74: mod_base = OTHER; note = 2'-O-Methyl-adenosine
  modified_base 75: mod_base = OTHER; note = 2'-O-Methyl-adenosine
  modified_base 76: mod_base = OTHER; note = 2'-O-Methyl-adenosine
  modified_base 77: mod_base = OTHER; note = 2'-O-Methyl-adenosine
  modified_base 78: mod_base = OTHER; note = 2'-O-Methyl-adenosine
  modified_base 79: mod_base = OTHER; note = 2'-O-Methyl-guanosine
  modified_base 80: mod_base = OTHER; note = 2'-O-Methyl-uridine
  modified_base 82: mod_base = OTHER; note = 2'-O-Methyl-guanosine
  modified_base 83: mod_base = OTHER; note = 2'-O-Methyl-cytidine
  modified_base 84: mod_base = OTHER; note = 2'-O-Methyl-adenosine
  modified_base 85: mod_base = OTHER; note = 2'-O-Methyl-cytidine
  modified_base 86: mod_base = OTHER; note = 2'-O-Methyl-cytidine
  modified_base 87: mod_base = OTHER; note = 2'-O-Methyl-guanosine
  modified_base 89: mod_base = OTHER; note = 2'-O-Methyl-guanosine
  modified_base 92: mod_base = OTHER; note = 2'-O-Methyl-guanosine
  modified_base 93: mod_base = OTHER; note = 2'-O-Methyl-guanosine
  modified_base 94: mod_base = OTHER; note = 2'-O-Methyl-uridine
  modified_base 95: mod_base = OTHER; note = 2'-O-Methyl-guanosine
  modified_base 96: mod_base = OTHER; note = 2'-O-Methyl-cytidine
  modified_base 97: mod_base = OTHER; note = 2'-O-Methyl-uridine
  modified_base 98: mod_base = OTHER; note = 2'-O-Methyl-uridine phosphorothioate
  modified_base 99: mod_base = OTHER; note = 2'-O-Methyl-uridine phosphorothioate
  modified_base 100: mod_base = OTHER; note = 2'-O-Methyl-uridine
  misc_difference 101: note = a, c, g, inosine, u, deoxyadenosine, deoxyguanosine, deoxycytidine, deoxyinosine, thymine, ribonebularine, 2'-O-methylnebularine, or 2'-deoxynebularine
  misc_difference 102: note = a, c, g, inosine, u, deoxyadenosine, deoxyguanosine, deoxycytidine, deoxyinosine, thymine, ribonebularine, 2'-O-methylnebularine, or 2'-deoxynebularine
  misc_difference 103: note = a, c, g, inosine, u, deoxyadenosine, deoxyguanosine, deoxycytidine, deoxyinosine, thymine, ribonebularine, 2'-O-methylnebularine, or 2'-deoxynebularine

SEQ ID NO: 3075 - RNA, 103 nt, synthetic construct; identical to SEQ ID NO: 1795
  source 1..103: mol_type = other RNA
  modified_base 1: mod_base = OTHER; note = 2'-O-Methyl-cytidine phosphorothioate
  modified_base 2: mod_base = OTHER; note = 2'-O-Methyl-cytidine phosphorothioate
  modified_base 3: mod_base = OTHER; note = 2'-O-Methyl-cytidine
  modified_base 21: mod_base = OTHER; note = 2'-O-Methyl-guanosine
  modified_base 25: mod_base = OTHER; note = uridine phosphorothioate
  modified_base 28: mod_base = OTHER; note = 2'-O-Methyl-adenosine
  modified_base 29: mod_base = OTHER; note = 2'-O-Methyl-guanosine
  modified_base 30: mod_base = OTHER; note = 2'-O-Methyl-cytidine
  modified_base 31: mod_base = OTHER; note = 2'-O-Methyl-uridine
  modified_base 32: mod_base = OTHER; note = 2'-O-Methyl-adenosine
  modified_base 33: mod_base = OTHER; note = 2'-O-Methyl-guanosine
  modified_base 34: mod_base = OTHER; note = 2'-O-Methyl-adenosine
  modified_base 35: mod_base = OTHER; note = 2'-O-Methyl-adenosine
  modified_base 36: mod_base = OTHER; note = 2'-O-Methyl-adenosine
  modified_base 37: mod_base = OTHER; note = 2'-O-Methyl-uridine
  modified_base 38: mod_base = OTHER; note = 2'-O-Methyl-adenosine
  modified_base 39: mod_base = OTHER; note = 2'-O-Methyl-guanosine
  modified_base 40: mod_base = OTHER; note = 2'-O-Methyl-cytidine
  modified_base 41: mod_base = OTHER; note = 2'-O-Methyl-adenosine
  modified_base 42: mod_base = OTHER; note = 2'-O-Methyl-adenosine
  modified_base 45: mod_base = OTHER; note = uridine phosphorothioate
  modified_base 46: mod_base = OTHER; note = 2'-O-Methyl-adenosine
  modified_base 48: mod_base = OTHER; note = 2'-O-Methyl-adenosine
  modified_base 50: mod_base = OTHER; note = 2'-O-Methyl-uridine
  modified_base 52: mod_base = OTHER; note = 2'-O-Methyl-adenosine
  modified_base 53: mod_base = OTHER; note = 2'-O-Methyl-guanosine
  modified_base 54: mod_base = OTHER; note = 2'-O-Methyl-guanosine
  modified_base 55: mod_base = OTHER; note = 2'-O-Methyl-cytidine
  modified_base 56: mod_base = OTHER; note = 2'-O-Methyl-uridine
  modified_base 57: mod_base = OTHER; note = 2'-O-Methyl-adenosine
  modified_base 60: mod_base = OTHER; note = 2'-O-Methyl-cytidine
  modified_base 61: mod_base = OTHER; note = 2'-O-Methyl-cytidine
  modified_base 66: mod_base = OTHER; note = 2'-O-Methyl-uridine
  modified_base 67: mod_base = OTHER; note = 2'-O-Methyl-cytidine
  modified_base 70: mod_base = OTHER; note = 2'-O-Methyl-cytidine
  modified_base 71: mod_base = OTHER; note = 2'-O-Methyl-uridine
  modified_base 72: mod_base = OTHER; note = 2'-O-Methyl-uridine
  modified_base 73: mod_base = OTHER; note = 2'-O-Methyl-guanosine
  modified_base 74: mod_base = OTHER; note = 2'-O-Methyl-adenosine
  modified_base 75: mod_base = OTHER; note = 2'-O-Methyl-adenosine
  modified_base 76: mod_base = OTHER; note = 2'-O-Methyl-adenosine
  modified_base 77: mod_base = OTHER; note = 2'-O-Methyl-adenosine
  modified_base 78: mod_base = OTHER; note = 2'-O-Methyl-adenosine
  modified_base 79: mod_base = OTHER; note = 2'-O-Methyl-guanosine
  modified_base 80: mod_base = OTHER; note = 2'-O-Methyl-uridine
  modified_base 81: mod_base = OTHER; note = 2'-O-Methyl-guanosine
  modified_base 83: mod_base = OTHER; note = 2'-O-Methyl-cytidine
  modified_base 84: mod_base = OTHER; note = 2'-O-Methyl-adenosine
  modified_base 85: mod_base = OTHER; note = 2'-O-Methyl-cytidine
  modified_base 86: mod_base = OTHER; note = 2'-O-Methyl-cytidine
  modified_base 87: mod_base = OTHER; note = 2'-O-Methyl-guanosine
  modified_base 88: mod_base = OTHER; note = 2'-O-Methyl-adenosine
  modified_base 89: mod_base = OTHER; note = 2'-O-Methyl-guanosine
  modified_base 90: mod_base = OTHER; note = 2'-O-Methyl-uridine
  modified_base 91: mod_base = OTHER; note = 2'-O-Methyl-cytidine
  modified_base 92: mod_base = OTHER; note = 2'-O-Methyl-guanosine
  modified_base 93: mod_base = OTHER; note = 2'-O-Methyl-guanosine
  modified_base 94: mod_base = OTHER; note = 2'-O-Methyl-uridine
  modified_base 95: mod_base = OTHER; note = 2'-O-Methyl-guanosine
  modified_base 96: mod_base = OTHER; note = 2'-O-Methyl-cytidine
  modified_base 97: mod_base = OTHER; note = 2'-O-Methyl-uridine
  modified_base 98: mod_base = OTHER; note = 2'-O-Methyl-uridine phosphorothioate
  modified_base 99: mod_base = OTHER; note = 2'-O-Methyl-uridine phosphorothioate
  modified_base 100: mod_base = OTHER; note = 2'-O-Methyl-uridine
  misc_difference 101: note = a, c, g, inosine, u, deoxyadenosine, deoxyguanosine, deoxycytidine, deoxyinosine, thymine, ribonebularine, 2'-O-methylnebularine, or 2'-deoxynebularine
  misc_difference 102: note = a, c, g, inosine, u, deoxyadenosine, deoxyguanosine, deoxycytidine, deoxyinosine, thymine, ribonebularine, 2'-O-methylnebularine, or 2'-deoxynebularine
  misc_difference 103: note = a, c, g, inosine, u, deoxyadenosine, deoxyguanosine, deoxycytidine, deoxyinosine, thymine, ribonebularine, 2'-O-methylnebularine, or 2'-deoxynebularine

SEQ ID NO: 3076 - RNA, 103 nt, synthetic construct; identical to SEQ ID NO: 1795
  source 1..103: mol_type = other RNA
  modified_base 1: mod_base = OTHER; note = 2'-O-Methyl-cytidine phosphorothioate
  modified_base 2: mod_base = OTHER; note = 2'-O-Methyl-cytidine phosphorothioate
  modified_base 3: mod_base = OTHER; note = 2'-O-Methyl-cytidine
  modified_base 21: mod_base = OTHER; note = 2'-O-Methyl-guanosine
  modified_base 25: mod_base = OTHER; note = uridine phosphorothioate
  modified_base 28: mod_base = OTHER; note = 2'-O-Methyl-adenosine
  modified_base 29: mod_base = OTHER; note = 2'-O-Methyl-guanosine
  modified_base 30: mod_base = OTHER; note = 2'-O-Methyl-cytidine
  modified_base 31: mod_base = OTHER; note = 2'-O-Methyl-uridine
  modified_base 32: mod_base = OTHER; note = 2'-O-Methyl-adenosine
  modified_base 34: mod_base = OTHER; note = 2'-O-Methyl-adenosine
  modified_base 35: mod_base = OTHER; note = 2'-O-Methyl-adenosine
  modified_base 36: mod_base = OTHER; note = 2'-O-Methyl-adenosine
  modified_base 37: mod_base = OTHER; note = 2'-O-Methyl-uridine
  modified_base 38: mod_base = OTHER; note = 2'-O-Methyl-adenosine
  modified_base 39: mod_base = OTHER; note = 2'-O-Methyl-guanosine
  modified_base 40: mod_base = OTHER; note = 2'-O-Methyl-cytidine
  modified_base 41: mod_base = OTHER; note = 2'-O-Methyl-adenosine
  modified_base 42: mod_base = OTHER; note = 2'-O-Methyl-adenosine
  modified_base 45: mod_base = OTHER; note = uridine phosphorothioate
  modified_base 46: mod_base = OTHER; note = 2'-O-Methyl-adenosine
  modified_base 48: mod_base = OTHER; note = 2'-O-Methyl-adenosine
  modified_base 50: mod_base = OTHER; note = 2'-O-Methyl-uridine
  modified_base 52: mod_base = OTHER; note = 2'-O-Methyl-adenosine
  modified_base 53: mod_base = OTHER; note = 2'-O-Methyl-guanosine
  modified_base 54: mod_base = OTHER; note = 2'-O-Methyl-guanosine
  modified_base 55: mod_base = OTHER; note = 2'-O-Methyl-cytidine
  modified_base 56: mod_base = OTHER; note = 2'-O-Methyl-uridine
  modified_base 57: mod_base = OTHER; note = 2'-O-Methyl-adenosine
  modified_base 60: mod_base = OTHER; note = 2'-O-Methyl-cytidine
  modified_base 61: mod_base = OTHER; note = 2'-O-Methyl-cytidine
  modified_base 66: mod_base = OTHER; note = 2'-O-Methyl-uridine
  modified_base 67: mod_base = OTHER; note = 2'-O-Methyl-cytidine
  modified_base 70: mod_base = OTHER; note = 2'-O-Methyl-cytidine
  modified_base 71: mod_base = OTHER; note = 2'-O-Methyl-uridine
  modified_base 72: mod_base = OTHER; note = 2'-O-Methyl-uridine
  modified_base 74: mod_base = OTHER; note = 2'-O-Methyl-adenosine
  modified_base 75: mod_base = OTHER; note = 2'-O-Methyl-adenosine
  modified_base 76: mod_base = OTHER; note = 2'-O-Methyl-adenosine
  modified_base 77: mod_base = OTHER; note = 2'-O-Methyl-adenosine
  modified_base 78: mod_base = OTHER; note = 2'-O-Methyl-adenosine
  modified_base 79: mod_base = OTHER; note = 2'-O-Methyl-guanosine
  modified_base 80: mod_base = OTHER; note = 2'-O-Methyl-uridine
  modified_base 81: mod_base = OTHER; note = 2'-O-Methyl-guanosine
  modified_base 83: mod_base = OTHER; note = 2'-O-Methyl-cytidine
  modified_base 84: mod_base = OTHER; note = 2'-O-Methyl-adenosine
  modified_base 85: mod_base = OTHER; note = 2'-O-Methyl-cytidine
  modified_base 86: mod_base = OTHER; note = 2'-O-Methyl-cytidine
  modified_base 87: mod_base = OTHER; note = 2'-O-Methyl-guanosine
  modified_base 88: mod_base = OTHER; note = 2'-O-Methyl-adenosine
  modified_base 89: mod_base = OTHER; note = 2'-O-Methyl-guanosine
  modified_base 90: mod_base = OTHER; note = 2'-O-Methyl-uridine
  modified_base 91: mod_base = OTHER; note = 2'-O-Methyl-cytidine
  modified_base 92: mod_base = OTHER; note = 2'-O-Methyl-guanosine
  modified_base 93: mod_base = OTHER; note = 2'-O-Methyl-guanosine
  modified_base 94: mod_base = OTHER; note = 2'-O-Methyl-uridine
  modified_base 95: mod_base = OTHER; note = 2'-O-Methyl-guanosine
  modified_base 96: mod_base = OTHER; note = 2'-O-Methyl-cytidine
  modified_base 97: mod_base = OTHER; note = 2'-O-Methyl-uridine
  modified_base 98: mod_base = OTHER; note = 2'-O-Methyl-uridine phosphorothioate
  modified_base 99: mod_base = OTHER; note = 2'-O-Methyl-uridine phosphorothioate
  modified_base 100: mod_base = OTHER; note = 2'-O-Methyl-uridine
  misc_difference 101: note = a, c, g, inosine, u, deoxyadenosine, deoxyguanosine, deoxycytidine, deoxyinosine, thymine, ribonebularine, 2'-O-methylnebularine, or 2'-deoxynebularine
  misc_difference 102: note = a, c, g, inosine, u, deoxyadenosine, deoxyguanosine, deoxycytidine, deoxyinosine, thymine, ribonebularine, 2'-O-methylnebularine, or 2'-deoxynebularine
  misc_difference 103: note = a, c, g, inosine, u, deoxyadenosine, deoxyguanosine, deoxycytidine, deoxyinosine, thymine, ribonebularine, 2'-O-methylnebularine, or 2'-deoxynebularine

SEQ ID NO: 3077 - RNA, 103 nt, synthetic construct; identical to SEQ ID NO: 1796
  source 1..103: mol_type = other RNA
  modified_base 1: mod_base = OTHER; note = 2'-O-Methyl-guanosine phosphorothioate
  modified_base 2: mod_base = OTHER; note = 2'-O-Methyl-adenosine phosphorothioate
  modified_base 3: mod_base = OTHER; note = 2'-O-Methyl-guanosine
  modified_base 21: mod_base = OTHER; note = 2'-O-Methyl-guanosine
  modified_base 25: mod_base = OTHER; note = uridine phosphorothioate
  modified_base 28: mod_base = OTHER; note = 2'-O-Methyl-adenosine
  modified_base 29: mod_base = OTHER; note = 2'-O-Methyl-guanosine
  modified_base 30: mod_base = OTHER; note = 2'-O-Methyl-cytidine
  modified_base 31: mod_base = OTHER; note = 2'-O-Methyl-uridine
  modified_base 32: mod_base = OTHER; note = 2'-O-Methyl-adenosine
  modified_base 33: mod_base = OTHER; note = 2'-O-Methyl-guanosine
  modified_base 34: mod_base = OTHER; note = 2'-O-Methyl-adenosine
  modified_base 35: mod_base = OTHER; note = 2'-O-Methyl-adenosine
  modified_base 36: mod_base = OTHER; note = 2'-O-Methyl-adenosine
  modified_base 37: mod_base = OTHER; note = 2'-O-Methyl-uridine
  modified_base 38: mod_base = OTHER; note = 2'-O-Methyl-adenosine
  modified_base 39: mod_base = OTHER; note = 2'-O-Methyl-guanosine
  modified_base 40: mod_base = OTHER; note = 2'-O-Methyl-cytidine
  modified_base 41: mod_base = OTHER; note = 2'-O-Methyl-adenosine
  modified_base 42: mod_base = OTHER; note = 2'-O-Methyl-adenosine
  modified_base 45: mod_base = OTHER; note = uridine phosphorothioate
  modified_base 46: mod_base = OTHER; note = 2'-O-Methyl-adenosine
  modified_base 48: mod_base = OTHER; note = 2'-O-Methyl-adenosine
  modified_base 50: mod_base = OTHER; note = 2'-O-Methyl-uridine
  modified_base 52: mod_base = OTHER; note = 2'-O-Methyl-adenosine
  modified_base 53: mod_base = OTHER; note = 2'-O-Methyl-guanosine
  modified_base 54: mod_base = OTHER; note = 2'-O-Methyl-guanosine
  modified_base 55: mod_base = OTHER; note = 2'-O-Methyl-cytidine
  modified_base 56: mod_base = OTHER; note = 2'-O-Methyl-uridine
  modified_base 57: mod_base = OTHER; note = 2'-O-Methyl-adenosine
  modified_base 60: mod_base = OTHER; note = 2'-O-Methyl-cytidine
  modified_base 61: mod_base = OTHER; note = 2'-O-Methyl-cytidine
  modified_base 66: mod_base = OTHER; note = 2'-O-Methyl-uridine
  modified_base 67: mod_base = OTHER; note = 2'-O-Methyl-cytidine
  modified_base 70: mod_base = OTHER; note = 2'-O-Methyl-cytidine
  modified_base 71: mod_base = OTHER; note = 2'-O-Methyl-uridine
  modified_base 72: mod_base = OTHER; note = 2'-O-Methyl-uridine
  modified_base 73: mod_base = OTHER; note = 2'-O-Methyl-guanosine
  modified_base 74: mod_base = OTHER; note = 2'-O-Methyl-adenosine
  modified_base 75: mod_base = OTHER; note = 2'-O-Methyl-adenosine
  modified_base 76: mod_base = OTHER; note = 2'-O-Methyl-adenosine
  modified_base 77: mod_base = OTHER; note = 2'-O-Methyl-adenosine
  modified_base 78: mod_base = OTHER; note = 2'-O-Methyl-adenosine
  modified_base 79: mod_base = OTHER; note = 2'-O-Methyl-guanosine
  modified_base 80: mod_base = OTHER; note = 2'-O-Methyl-uridine
  modified_base 81: mod_base = OTHER; note = 2'-O-Methyl-guanosine
  modified_base 83: mod_base = OTHER; note = 2'-O-Methyl-cytidine
  modified_base 84: mod_base = OTHER; note = 2'-O-Methyl-adenosine
  modified_base 85: mod_base = OTHER; note = 2'-O-Methyl-cytidine
  modified_base 86: mod_base = OTHER; note = 2'-O-Methyl-cytidine
  modified_base 87: mod_base = OTHER; note = 2'-O-Methyl-guanosine
  modified_base 88: mod_base = OTHER; note = 2'-O-Methyl-adenosine
  modified_base 89: mod_base = OTHER; note = 2'-O-Methyl-guanosine
  modified_base 90: mod_base = OTHER; note = 2'-O-Methyl-uridine
  modified_base 91: mod_base = OTHER; note = 2'-O-Methyl-cytidine
  modified_base 92: mod_base = OTHER; note = 2'-O-Methyl-guanosine
  modified_base 93: mod_base = OTHER; note = 2'-O-Methyl-guanosine
  modified_base 94: mod_base = OTHER; note = 2'-O-Methyl-uridine
  modified_base 95: mod_base = OTHER; note = 2'-O-Methyl-guanosine
  modified_base 96: mod_base = OTHER; note = 2'-O-Methyl-cytidine
  modified_base 97: mod_base = OTHER; note = 2'-O-Methyl-uridine
  modified_base 98: mod_base = OTHER; note = 2'-O-Methyl-uridine phosphorothioate
  modified_base 99: mod_base = OTHER; note = 2'-O-Methyl-uridine phosphorothioate
  modified_base 100: mod_base = OTHER; note = 2'-O-Methyl-uridine
  misc_difference 101: note = a, c, g, inosine, u, deoxyadenosine, deoxyguanosine, deoxycytidine, deoxyinosine, thymine, ribonebularine, 2'-O-methylnebularine, or 2'-deoxynebularine
  misc_difference 102: note = a, c, g, inosine, u, deoxyadenosine, deoxyguanosine, deoxycytidine, deoxyinosine, thymine, ribonebularine, 2'-O-methylnebularine, or 2'-deoxynebularine
  misc_difference 103: note = a, c, g, inosine, u, deoxyadenosine, deoxyguanosine, deoxycytidine, deoxyinosine, thymine, ribonebularine, 2'-O-methylnebularine, or 2'-deoxynebularine

SEQ ID NO: 3078 - RNA, 103 nt, synthetic construct; identical to SEQ ID NO: 1796
  source 1..103: mol_type = other RNA
  modified_base 1: mod_base = OTHER; note = 2'-O-Methyl-guanosine phosphorothioate
  modified_base 2: mod_base = OTHER; note = 2'-O-Methyl-adenosine phosphorothioate
  modified_base 3: mod_base = OTHER; note = 2'-O-Methyl-guanosine
  modified_base 21: mod_base = OTHER; note = 2'-O-Methyl-guanosine
  modified_base 25: mod_base = OTHER; note = uridine phosphorothioate
  modified_base 28: mod_base = OTHER; note = 2'-O-Methyl-adenosine
  modified_base 29: mod_base = OTHER; note = 2'-O-Methyl-guanosine
  modified_base 30: mod_base = OTHER; note = 2'-O-Methyl-cytidine
  modified_base 31: mod_base = OTHER; note = 2'-O-Methyl-uridine
  modified_base 32: mod_base = OTHER; note = 2'-O-Methyl-adenosine
  modified_base 34: mod_base = OTHER; note = 2'-O-Methyl-adenosine
  modified_base 35: mod_base = OTHER; note = 2'-O-Methyl-adenosine
  modified_base 36: mod_base = OTHER; note = 2'-O-Methyl-adenosine
  modified_base 37: mod_base = OTHER; note = 2'-O-Methyl-uridine
  modified_base 38: mod_base = OTHER; note = 2'-O-Methyl-adenosine
  modified_base 39: mod_base = OTHER; note = 2'-O-Methyl-guanosine
  modified_base 40: mod_base = OTHER; note = 2'-O-Methyl-cytidine
  modified_base 41: mod_base = OTHER; note = 2'-O-Methyl-adenosine
  modified_base 42: mod_base = OTHER; note = 2'-O-Methyl-adenosine
  modified_base 45: mod_base = OTHER; note = uridine phosphorothioate
  modified_base 46: mod_base = OTHER; note = 2'-O-Methyl-adenosine
  modified_base 48: mod_base = OTHER; note = 2'-O-Methyl-adenosine
  modified_base 50: mod_base = OTHER; note = 2'-O-Methyl-uridine
  modified_base 52: mod_base = OTHER; note = 2'-O-Methyl-adenosine
  modified_base 53: mod_base = OTHER; note = 2'-O-Methyl-guanosine
  modified_base 54: mod_base = OTHER; note = 2'-O-Methyl-guanosine
  modified_base 55: mod_base = OTHER; note = 2'-O-Methyl-cytidine
  modified_base 56: mod_base = OTHER; note = 2'-O-Methyl-uridine
  modified_base 57: mod_base = OTHER; note = 2'-O-Methyl-adenosine
  modified_base 60: mod_base = OTHER; note = 2'-O-Methyl-cytidine
  modified_base 61: mod_base = OTHER; note = 2'-O-Methyl-cytidine
  modified_base 66: mod_base = OTHER; note = 2'-O-Methyl-uridine
  modified_base 67: mod_base = OTHER; note = 2'-O-Methyl-cytidine
  modified_base 70: mod_base = OTHER; note = 2'-O-Methyl-cytidine
  modified_base 71: mod_base = OTHER; note = 2'-O-Methyl-uridine
  modified_base 72: mod_base = OTHER; note = 2'-O-Methyl-uridine
  modified_base 74: mod_base = OTHER; note = 2'-O-Methyl-adenosine
  modified_base 75: mod_base = OTHER; note = 2'-O-Methyl-adenosine
  modified_base 76: mod_base = OTHER; note = 2'-O-Methyl-adenosine
  modified_base 77: mod_base = OTHER; note = 2'-O-Methyl-adenosine
  modified_base 78: mod_base = OTHER; note = 2'-O-Methyl-adenosine
  modified_base 79: mod_base = OTHER; note = 2'-O-Methyl-guanosine
  modified_base 80: mod_base = OTHER; note = 2'-O-Methyl-uridine
  modified_base 81: mod_base = OTHER; note = 2'-O-Methyl-guanosine
  modified_base 83: mod_base = OTHER; note = 2'-O-Methyl-cytidine
  modified_base 84: mod_base = OTHER; note = 2'-O-Methyl-adenosine
  modified_base 85: mod_base = OTHER; note = 2'-O-Methyl-cytidine
  modified_base 86: mod_base = OTHER; note = 2'-O-Methyl-cytidine
  modified_base 87: mod_base = OTHER; note = 2'-O-Methyl-guanosine
  modified_base 88: mod_base = OTHER; note = 2'-O-Methyl-adenosine
  modified_base 89: mod_base = OTHER; note = 2'-O-Methyl-guanosine
  modified_base 90: mod_base = OTHER; note = 2'-O-Methyl-uridine
  modified_base 91: mod_base = OTHER; note = 2'-O-Methyl-cytidine
  modified_base 92: mod_base = OTHER; note = 2'-O-Methyl-guanosine
  modified_base 93: mod_base = OTHER; note = 2'-O-Methyl-guanosine
  modified_base 94: mod_base = OTHER; note = 2'-O-Methyl-uridine
  modified_base 95: mod_base = OTHER; note = 2'-O-Methyl-guanosine
  modified_base 96: mod_base = OTHER; note = 2'-O-Methyl-cytidine
  modified_base 97: mod_base = OTHER; note = 2'-O-Methyl-uridine
  modified_base 98: mod_base = OTHER; note = 2'-O-Methyl-uridine phosphorothioate
  modified_base 99: mod_base = OTHER; note = 2'-O-Methyl-uridine phosphorothioate
  modified_base 100: mod_base = OTHER; note = 2'-O-Methyl-uridine
  misc_difference 101: note = a, c, g, inosine, u, deoxyadenosine, deoxyguanosine, deoxycytidine, deoxyinosine, thymine, ribonebularine, 2'-O-methylnebularine, or 2'-deoxynebularine
  misc_difference 102: note = a, c, g, inosine, u, deoxyadenosine, deoxyguanosine, deoxycytidine, deoxyinosine, thymine, ribonebularine, 2'-O-methylnebularine, or 2'-deoxynebularine
  misc_difference 103: note = a, c, g, inosine, u, deoxyadenosine, deoxyguanosine, deoxycytidine, deoxyinosine, thymine, ribonebularine, 2'-O-methylnebularine, or 2'-deoxynebularine

SEQ ID NO: 3079 - RNA, 103 nt, synthetic construct; identical to SEQ ID NO: 1797
  source 1..103: mol_type = other RNA
  modified_base 1: mod_base = OTHER; note = 2'-O-Methyl-cytidine phosphorothioate
  modified_base 2: mod_base = OTHER; note = 2'-O-Methyl-adenosine phosphorothioate
  modified_base 3: mod_base = OTHER; note = 2'-O-Methyl-guanosine
  modified_base 21: mod_base = OTHER; note = 2'-O-Methyl-guanosine
  modified_base 25: mod_base = OTHER; note = uridine phosphorothioate
  modified_base 28: mod_base = OTHER; note = 2'-O-Methyl-adenosine
  modified_base 29: mod_base = OTHER; note = 2'-O-Methyl-guanosine
  modified_base 30: mod_base = OTHER; note = 2'-O-Methyl-cytidine
  modified_base 31: mod_base = OTHER; note = 2'-O-Methyl-uridine
  modified_base 32: mod_base = OTHER; note = 2'-O-Methyl-adenosine
  modified_base 33: mod_base = OTHER; note = 2'-O-Methyl-guanosine
  modified_base 34: mod_base = OTHER; note = 2'-O-Methyl-adenosine
  modified_base 35: mod_base = OTHER; note = 2'-O-Methyl-adenosine
  modified_base 36: mod_base = OTHER; note = 2'-O-Methyl-adenosine
  modified_base 37: mod_base = OTHER; note = 2'-O-Methyl-uridine
  modified_base 38: mod_base = OTHER; note = 2'-O-Methyl-adenosine
  modified_base 39: mod_base = OTHER; note = 2'-O-Methyl-guanosine
  modified_base 40: mod_base = OTHER; note = 2'-O-Methyl-cytidine
  modified_base 41: mod_base = OTHER; note = 2'-O-Methyl-adenosine
  modified_base 42: mod_base = OTHER; note = 2'-O-Methyl-adenosine
  modified_base 45: mod_base = OTHER; note = uridine phosphorothioate
  modified_base 46: mod_base = OTHER; note = 2'-O-Methyl-adenosine
  modified_base 48: mod_base = OTHER; note = 2'-O-Methyl-adenosine
  modified_base 50: mod_base = OTHER; note = 2'-O-Methyl-uridine
  modified_base 52: mod_base = OTHER; note = 2'-O-Methyl-adenosine
  modified_base 53: mod_base = OTHER; note = 2'-O-Methyl-guanosine
  modified_base 54: mod_base = OTHER; note = 2'-O-Methyl-guanosine
  modified_base 57: mod_base = OTHER; note = 2'-O-Methyl-adenosine
  modified_base 61: mod_base = OTHER; note = 2'-O-Methyl-cytidine
  modified_base 66: mod_base = OTHER; note = 2'-O-Methyl-uridine
  modified_base 67: mod_base = OTHER; note = 2'-O-Methyl-cytidine
  modified_base 70: mod_base = OTHER; note = 2'-O-Methyl-cytidine
  modified_base 71: mod_base = OTHER; note = 2'-O-Methyl-uridine
  modified_base 72: mod_base = OTHER; note = 2'-O-Methyl-uridine
  modified_base 74: mod_base = OTHER; note = 2'-O-Methyl-adenosine
  modified_base 75: mod_base = OTHER; note = 2'-O-Methyl-adenosine
  modified_base 76: mod_base = OTHER; note = 2'-O-Methyl-adenosine
  modified_base 77: mod_base = OTHER; note = 2'-O-Methyl-adenosine
  modified_base 78: mod_base = OTHER; note = 2'-O-Methyl-adenosine
  modified_base 79: mod_base = OTHER; note = 2'-O-Methyl-guanosine
  modified_base 80: mod_base = OTHER; note = 2'-O-Methyl-uridine
  modified_base 82: mod_base = OTHER; note = 2'-O-Methyl-guanosine
  modified_base 83: mod_base = OTHER; note = 2'-O-Methyl-cytidine
  modified_base 84: mod_base = OTHER; note = 2'-O-Methyl-adenosine
  modified_base 85: mod_base = OTHER; note = 2'-O-Methyl-cytidine
  modified_base 86: mod_base = OTHER; note = 2'-O-Methyl-cytidine
  modified_base 87: mod_base = OTHER; note = 2'-O-Methyl-guanosine
  modified_base 89: mod_base = OTHER; note = 2'-O-Methyl-guanosine
  modified_base 92: mod_base = OTHER; note = 2'-O-Methyl-guanosine
  modified_base 93: mod_base = OTHER; note = 2'-O-Methyl-guanosine
  modified_base 94: mod_base = OTHER; note = 2'-O-Methyl-uridine
  modified_base 95: mod_base = OTHER; note = 2'-O-Methyl-guanosine
  modified_base 96: mod_base = OTHER; note = 2'-O-Methyl-cytidine
  modified_base 97: mod_base = OTHER; note = 2'-O-Methyl-uridine
  modified_base 98: mod_base = OTHER; note = 2'-O-Methyl-uridine phosphorothioate
  modified_base 99: mod_base = OTHER; note = 2'-O-Methyl-uridine phosphorothioate
  modified_base 100: mod_base = OTHER; note = 2'-O-Methyl-uridine
  misc_difference 101: note = a, c, g, inosine, u, deoxyadenosine, deoxyguanosine, deoxycytidine, deoxyinosine, thymine, ribonebularine, 2'-O-methylnebularine, or 2'-deoxynebularine
  misc_difference 102: note = a, c, g, inosine, u, deoxyadenosine, deoxyguanosine, deoxycytidine, deoxyinosine, thymine, ribonebularine, 2'-O-methylnebularine, or 2'-deoxynebularine
  misc_difference 103: note = a, c, g, inosine, u, deoxyadenosine, deoxyguanosine, deoxycytidine, deoxyinosine, thymine, ribonebularine, 2'-O-methylnebularine, or 2'-deoxynebularine

SEQ ID NO: 3080 - RNA, 103 nt, synthetic construct; identical to SEQ ID NO: 1797
  source 1..103: mol_type = other RNA
  modified_base 1: mod_base = OTHER; note = 2'-O-Methyl-cytidine phosphorothioate
  modified_base 2: mod_base = OTHER; note = 2'-O-Methyl-adenosine phosphorothioate
  modified_base 3: mod_base = OTHER; note = 2'-O-Methyl-guanosine
  modified_base 21: mod_base = OTHER; note = 2'-O-Methyl-guanosine
  modified_base 25: mod_base = OTHER; note = uridine phosphorothioate
  modified_base 28: mod_base = OTHER; note = 2'-O-Methyl-adenosine
  modified_base 29: mod_base = OTHER; note = 2'-O-Methyl-guanosine
  modified_base 30: mod_base = OTHER; note = 2'-O-Methyl-cytidine
  modified_base 31: mod_base = OTHER; note = 2'-O-Methyl-uridine
  modified_base 32: mod_base = OTHER; note = 2'-O-Methyl-adenosine
  modified_base 33: mod_base = OTHER; note = 2'-O-Methyl-guanosine
  modified_base 34: mod_base = OTHER; note = 2'-O-Methyl-adenosine
  modified_base 35: mod_base = OTHER; note = 2'-O-Methyl-adenosine
  modified_base 36: mod_base = OTHER; note = 2'-O-Methyl-adenosine
  modified_base 37: mod_base = OTHER; note = 2'-O-Methyl-uridine
  modified_base 38: mod_base = OTHER; note = 2'-O-Methyl-adenosine
  modified_base 39: mod_base = OTHER; note = 2'-O-Methyl-guanosine
  modified_base 40: mod_base = OTHER; note = 2'-O-Methyl-cytidine
  modified_base 41: mod_base = OTHER; note = 2'-O-Methyl-adenosine
  modified_base 42: mod_base = OTHER; note = 2'-O-Methyl-adenosine
  modified_base 45: mod_base = OTHER; note = uridine phosphorothioate
  modified_base 46: mod_base = OTHER; note = 2'-O-Methyl-adenosine
  modified_base 48: mod_base = OTHER; note = 2'-O-Methyl-adenosine
  modified_base 50: mod_base = OTHER; note = 2'-O-Methyl-uridine
  modified_base 52: mod_base = OTHER; note = 2'-O-Methyl-adenosine
  modified_base 53: mod_base = OTHER; note = 2'-O-Methyl-guanosine
  modified_base 54: mod_base = OTHER; note = 2'-O-Methyl-guanosine
  modified_base 55: mod_base = OTHER; note = 2'-O-Methyl-cytidine
  modified_base 56: mod_base = OTHER; note = 2'-O-Methyl-uridine
  modified_base 57: mod_base = OTHER; note = 2'-O-Methyl-adenosine
  modified_base 60: mod_base = OTHER; note = 2'-O-Methyl-cytidine
  modified_base 61: mod_base = OTHER; note = 2'-O-Methyl-cytidine
  modified_base 66: mod_base = OTHER; note = 2'-O-Methyl-uridine
  modified_base 67: mod_base = OTHER; note = 2'-O-Methyl-cytidine
  modified_base 70: mod_base = OTHER; note = 2'-O-Methyl-cytidine
  modified_base 71: mod_base = OTHER; note = 2'-O-Methyl-uridine
  modified_base 72: mod_base = OTHER; note = 2'-O-Methyl-uridine
  modified_base 74: mod_base = OTHER; note = 2'-O-Methyl-adenosine
  modified_base 75: mod_base = OTHER; note = 2'-O-Methyl-adenosine
  modified_base 76: mod_base = OTHER; note = 2'-O-Methyl-adenosine
  modified_base 77: mod_base = OTHER; note = 2'-O-Methyl-adenosine
  modified_base 78: mod_base = OTHER; note = 2'-O-Methyl-adenosine
  modified_base 79: mod_base = OTHER; note = 2'-O-Methyl-guanosine
  modified_base 80: mod_base = OTHER; note = 2'-O-Methyl-uridine
  modified_base 82: mod_base = OTHER; note = 2'-O-Methyl-guanosine
  modified_base 83: mod_base = OTHER; note = 2'-O-Methyl-cytidine
  modified_base 84: mod_base = OTHER; note = 2'-O-Methyl-adenosine
  modified_base 85: mod_base = OTHER; note = 2'-O-Methyl-cytidine
  modified_base 86: mod_base = OTHER; note = 2'-O-Methyl-cytidine
  modified_base 87: mod_base = OTHER; note = 2'-O-Methyl-guanosine
  modified_base 89: mod_base = OTHER; note = 2'-O-Methyl-guanosine
  modified_base 92: mod_base = OTHER; note = 2'-O-Methyl-guanosine
  modified_base 93: mod_base = OTHER; note = 2'-O-Methyl-guanosine
  modified_base 94: mod_base = OTHER; note = 2'-O-Methyl-uridine
  modified_base 95: mod_base = OTHER; note = 2'-O-Methyl-guanosine
  modified_base 96: mod_base = OTHER; note = 2'-O-Methyl-cytidine
  modified_base 97: mod_base = OTHER; note = 2'-O-Methyl-uridine
  modified_base 98: mod_base = OTHER; note = 2'-O-Methyl-uridine phosphorothioate
  modified_base 99: mod_base = OTHER; note = 2'-O-Methyl-uridine phosphorothioate
  modified_base 100: mod_base = OTHER; note = 2'-O-Methyl-uridine
  misc_difference 101: note = a, c, g, inosine, u, deoxyadenosine, deoxyguanosine, deoxycytidine, deoxyinosine, thymine, ribonebularine, 2'-O-methylnebularine, or 2'-deoxynebularine
  misc_difference 102: note = a, c, g, inosine, u, deoxyadenosine, deoxyguanosine, deoxycytidine, deoxyinosine, thymine, ribonebularine, 2'-O-methylnebularine, or 2'-deoxynebularine
  misc_difference 103: note = a, c, g, inosine, u, deoxyadenosine, deoxyguanosine, deoxycytidine, deoxyinosine, thymine, ribonebularine, 2'-O-methylnebularine, or 2'-deoxynebularine

SEQ ID NO: 3081 - RNA, 103 nt, synthetic construct; identical to SEQ ID NO: 1797
  source 1..103: mol_type = other RNA
  modified_base 1: mod_base = OTHER; note = 2'-O-Methyl-cytidine phosphorothioate
  modified_base 2: mod_base = OTHER; note = 2'-O-Methyl-adenosine phosphorothioate
  modified_base 3: mod_base = OTHER; note = 2'-O-Methyl-guanosine
  modified_base 21: mod_base = OTHER; note = 2'-O-Methyl-guanosine
  modified_base 25: mod_base = OTHER; note = uridine phosphorothioate
  modified_base 28: mod_base = OTHER; note = 2'-O-Methyl-adenosine
  modified_base 29: mod_base = OTHER; note = 2'-O-Methyl-guanosine
  modified_base 30: mod_base = OTHER; note = 2'-O-Methyl-cytidine
  modified_base 31: mod_base = OTHER; note = 2'-O-Methyl-uridine
  modified_base 32: mod_base = OTHER; note = 2'-O-Methyl-adenosine
  modified_base 33: mod_base = OTHER; note = 2'-O-Methyl-guanosine
  modified_base 34: mod_base = OTHER; note = 2'-O-Methyl-adenosine
  modified_base 35: mod_base = OTHER; note = 2'-O-Methyl-adenosine
  modified_base 36: mod_base = OTHER; note = 2'-O-Methyl-adenosine
  modified_base 37: mod_base = OTHER; note = 2'-O-Methyl-uridine
  modified_base 38: mod_base = OTHER; note = 2'-O-Methyl-adenosine
  modified_base 39: mod_base = OTHER; note = 2'-O-Methyl-guanosine
  modified_base 40: mod_base = OTHER; note = 2'-O-Methyl-cytidine
  modified_base 41: mod_base = OTHER; note = 2'-O-Methyl-adenosine
  modified_base 42: mod_base = OTHER; note = 2'-O-Methyl-adenosine
  modified_base 45: mod_base = OTHER; note = uridine phosphorothioate
  modified_base 46: mod_base = OTHER; note = 2'-O-Methyl-adenosine
  modified_base 48: mod_base = OTHER; note = 2'-O-Methyl-adenosine
  modified_base 50: mod_base = OTHER; note = 2'-O-Methyl-uridine
  modified_base 52: mod_base = OTHER; note = 2'-O-Methyl-adenosine
  modified_base 53: mod_base = OTHER; note = 2'-O-Methyl-guanosine
  modified_base 54: mod_base = OTHER; note = 2'-O-Methyl-guanosine
  modified_base 57: mod_base = OTHER; note = 2'-O-Methyl-adenosine
  modified_base 61: mod_base = OTHER; note = 2'-O-Methyl-cytidine
  modified_base 66: mod_base = OTHER; note = 2'-O-Methyl-uridine
  modified_base 67: mod_base = OTHER; note = 2'-O-Methyl-cytidine
  modified_base 70: mod_base = OTHER; note = 2'-O-Methyl-cytidine
  modified_base 71: mod_base = OTHER; note = 2'-O-Methyl-uridine
  modified_base 72: mod_base = OTHER; note = 2'-O-Methyl-uridine
  modified_base 73: mod_base = OTHER; note = 2'-O-Methyl-guanosine
  modified_base 74: mod_base = OTHER; note = 2'-O-Methyl-adenosine
  modified_base 75: mod_base = OTHER; note = 2'-O-Methyl-adenosine
  modified_base 76: mod_base = OTHER; note = 2'-O-Methyl-adenosine
  modified_base 77: mod_base = OTHER; note = 2'-O-Methyl-adenosine
  modified_base 78: mod_base = OTHER; note = 2'-O-Methyl-adenosine
  modified_base 79: mod_base = OTHER; note = 2'-O-Methyl-guanosine
  modified_base 80: mod_base = OTHER; note = 2'-O-Methyl-uridine
  modified_base 82: mod_base = OTHER; note = 2'-O-Methyl-guanosine
  modified_base 83: mod_base = OTHER; note = 2'-O-Methyl-cytidine
  modified_base 84: mod_base = OTHER; note = 2'-O-Methyl-adenosine
  modified_base 85: mod_base = OTHER; note = 2'-O-Methyl-cytidine
  modified_base 86: mod_base = OTHER; note = 2'-O-Methyl-cytidine
  modified_base 87: mod_base = OTHER; note = 2'-O-Methyl-guanosine
  modified_base 89: mod_base = OTHER; note = 2'-O-Methyl-guanosine
  modified_base 92: mod_base = OTHER; note = 2'-O-Methyl-guanosine
  modified_base 93: mod_base = OTHER; note = 2'-O-Methyl-guanosine
  modified_base 94: mod_base = OTHER; note = 2'-O-Methyl-uridine
  modified_base 95: mod_base = OTHER; note = 2'-O-Methyl-guanosine
  modified_base 96: mod_base = OTHER; note = 2'-O-Methyl-cytidine
  modified_base 97: mod_base = OTHER; note = 2'-O-Methyl-uridine
  modified_base 98: mod_base = OTHER; note = 2'-O-Methyl-uridine phosphorothioate
  modified_base 99: mod_base = OTHER; note = 2'-O-Methyl-uridine phosphorothioate
  modified_base 100: mod_base = OTHER; note = 2'-O-Methyl-uridine
  misc_difference 101: note = a, c, g, inosine, u, deoxyadenosine, deoxyguanosine, deoxycytidine, deoxyinosine, thymine, ribonebularine, 2'-O-methylnebularine, or 2'-deoxynebularine
  misc_difference 102: note = a, c, g, inosine, u, deoxyadenosine, deoxyguanosine, deoxycytidine, deoxyinosine, thymine, ribonebularine, 2'-O-methylnebularine, or 2'-deoxynebularine
  misc_difference 103: note = a, c, g, inosine, u, deoxyadenosine, deoxyguanosine, deoxycytidine, deoxyinosine, thymine, ribonebularine, 2'-O-methylnebularine, or 2'-deoxynebularine

SEQ ID NO: 3082 - RNA, 103 nt, synthetic construct; identical to SEQ ID NO: 1797
  source 1..103: mol_type = other RNA
  modified_base 1: mod_base = OTHER; note = 2'-O-Methyl-cytidine phosphorothioate
  modified_base 2: mod_base = OTHER; note = 2'-O-Methyl-adenosine phosphorothioate
  modified_base 3: mod_base = OTHER; note = 2'-O-Methyl-guanosine
  modified_base 21: mod_base = OTHER; note = 2'-O-Methyl-guanosine
  modified_base 25: mod_base = OTHER; note = uridine phosphorothioate
  modified_base 28: mod_base = OTHER; note = 2'-O-Methyl-adenosine
  modified_base 29: mod_base = OTHER; note = 2'-O-Methyl-guanosine
  modified_base 30: mod_base = OTHER; note = 2'-O-Methyl-cytidine
  modified_base 31: mod_base = OTHER; note = 2'-O-Methyl-uridine
  modified_base 32: mod_base = OTHER; note = 2'-O-Methyl-adenosine
  modified_base 33: mod_base = OTHER; note = 2'-O-Methyl-guanosine
  modified_base 34: mod_base = OTHER; note = 2'-O-Methyl-adenosine
  modified_base 35: mod_base = OTHER; note = 2'-O-Methyl-adenosine
  modified_base 36: mod_base = OTHER; note = 2'-O-Methyl-adenosine
  modified_base 37: mod_base = OTHER; note = 2'-O-Methyl-uridine
  modified_base 38: mod_base = OTHER; note = 2'-O-Methyl-adenosine
  modified_base 39: mod_base = OTHER; note = 2'-O-Methyl-guanosine
  modified_base 40: mod_base = OTHER; note = 2'-O-Methyl-cytidine
  modified_base 41: mod_base = OTHER; note = 2'-O-Methyl-adenosine
  modified_base 42: mod_base = OTHER; note = 2'-O-Methyl-adenosine
  modified_base 45: mod_base = OTHER; note = uridine phosphorothioate
  modified_base 46: mod_base = OTHER; note = 2'-O-Methyl-adenosine
  modified_base 48: mod_base = OTHER; note = 2'-O-Methyl-adenosine
  modified_base 50: mod_base = OTHER; note = 2'-O-Methyl-uridine
  modified_base 52: mod_base = OTHER; note = 2'-O-Methyl-adenosine
  modified_base 53: mod_base = OTHER; note = 2'-O-Methyl-guanosine
  modified_base 54: mod_base = OTHER; note = 2'-O-Methyl-guanosine
  modified_base 57: mod_base = OTHER; note = 2'-O-Methyl-adenosine
  modified_base 61: mod_base = OTHER; note = 2'-O-Methyl-cytidine
  modified_base 66: mod_base = OTHER; note = 2'-O-Methyl-uridine
  modified_base 67: mod_base = OTHER; note = 2'-O-Methyl-cytidine
  modified_base 70: mod_base = OTHER; note = 2'-O-Methyl-cytidine
  modified_base 71: mod_base = OTHER; note = 2'-O-Methyl-uridine
  modified_base 72: mod_base = OTHER; note = 2'-O-Methyl-uridine
  modified_base 73: mod_base = OTHER; note = 2'-O-Methyl-guanosine
  modified_base 74: mod_base = OTHER; note = 2'-O-Methyl-adenosine
  modified_base 75: mod_base = OTHER; note = 2'-O-Methyl-adenosine
  modified_base 76: mod_base = OTHER; note = 2'-O-Methyl-adenosine
  modified_base 77: mod_base = OTHER; note = 2'-O-Methyl-adenosine
  modified_base 78: mod_base = OTHER; note = 2'-O-Methyl-adenosine
  modified_base 79: mod_base = OTHER; note = 2'-O-Methyl-guanosine
  modified_base 80: mod_base = OTHER; note = 2'-O-Methyl-uridine
  modified_base 82: mod_base = OTHER; note = 2'-O-Methyl-guanosine
  modified_base 83: mod_base = OTHER; note = 2'-O-Methyl-cytidine
  modified_base 84: mod_base = OTHER; note = 2'-O-Methyl-adenosine
  modified_base 85: mod_base = OTHER; note = 2'-O-Methyl-cytidine
  modified_base 86: mod_base = OTHER; note = 2'-O-Methyl-cytidine
  modified_base 87: mod_base = OTHER; note = 2'-O-Methyl-guanosine
  modified_base 89: mod_base = OTHER; note = 2'-O-Methyl-guanosine
  modified_base 91: mod_base = OTHER; note = 2'-O-Methyl-cytidine
  modified_base 92: mod_base = OTHER; note = 2'-O-Methyl-guanosine
  modified_base 93: mod_base = OTHER; note = 2'-O-Methyl-guanosine
  modified_base 94: mod_base = OTHER; note = 2'-O-Methyl-uridine
  modified_base 95: mod_base = OTHER; note = 2'-O-Methyl-guanosine
  modified_base 96: mod_base = OTHER; note = 2'-O-Methyl-cytidine
  modified_base 97: mod_base = OTHER; note = 2'-O-Methyl-uridine
  modified_base 98: mod_base = OTHER; note = 2'-O-Methyl-uridine phosphorothioate
  modified_base 99: mod_base = OTHER; note = 2'-O-Methyl-uridine phosphorothioate
  modified_base 100: mod_base = OTHER; note = 2'-O-Methyl-uridine
  misc_difference 101: note = a, c, g, inosine, u, deoxyadenosine, deoxyguanosine, deoxycytidine, deoxyinosine, thymine, ribonebularine, 2'-O-methylnebularine, or 2'-deoxynebularine
  misc_difference 102: note = a, c, g, inosine, u, deoxyadenosine, deoxyguanosine, deoxycytidine, deoxyinosine, thymine, ribonebularine, 2'-O-methylnebularine, or 2'-deoxynebularine
  misc_difference 103: note = a, c, g, inosine, u, deoxyadenosine, deoxyguanosine, deoxycytidine, deoxyinosine, thymine, ribonebularine, 2'-O-methylnebularine, or 2'-deoxynebularine

SEQ ID NO: 3083 - RNA, 103 nt, synthetic construct; identical to SEQ ID NO: 1797
  source 1..103: mol_type = other RNA
  modified_base 1: mod_base = OTHER; note = 2'-O-Methyl-cytidine phosphorothioate
  modified_base 2: mod_base = OTHER; note = 2'-O-Methyl-adenosine phosphorothioate
  modified_base 3: mod_base = OTHER; note = 2'-O-Methyl-guanosine
  modified_base 21: mod_base = OTHER; note = 2'-O-Methyl-guanosine
  modified_base 25: mod_base = OTHER; note = uridine phosphorothioate
  modified_base 28: mod_base = OTHER; note = 2'-O-Methyl-adenosine
  modified_base 29: mod_base = OTHER; note = 2'-O-Methyl-guanosine
  modified_base 30: mod_base = OTHER; note = 2'-O-Methyl-cytidine
  modified_base 31: mod_base = OTHER; note = 2'-O-Methyl-uridine
  modified_base 32: mod_base = OTHER; note = 2'-O-Methyl-adenosine
  modified_base 34: mod_base = OTHER; note = 2'-O-Methyl-adenosine
  modified_base 35: mod_base = OTHER; note = 2'-O-Methyl-adenosine
  modified_base 36: mod_base = OTHER; note = 2'-O-Methyl-adenosine
  modified_base 37: mod_base = OTHER; note = 2'-O-Methyl-uridine
  modified_base 38: mod_base = OTHER; note = 2'-O-Methyl-adenosine
  modified_base 39: mod_base = OTHER; note = 2'-O-Methyl-guanosine
  modified_base 40: mod_base = OTHER; note = 2'-O-Methyl-cytidine
  modified_base 41: mod_base = OTHER; note = 2'-O-Methyl-adenosine
  modified_base 42: mod_base = OTHER; note = 2'-O-Methyl-adenosine
  modified_base 45: mod_base = OTHER; note = uridine phosphorothioate
  modified_base 46: mod_base = OTHER; note = 2'-O-Methyl-adenosine
  modified_base 48: mod_base = OTHER; note = 2'-O-Methyl-adenosine
  modified_base 50: mod_base = OTHER; note = 2'-O-Methyl-uridine
  modified_base 52: mod_base = OTHER; note = 2'-O-Methyl-adenosine
  modified_base 53: mod_base = OTHER; note = 2'-O-Methyl-guanosine
  modified_base 54: mod_base = OTHER; note = 2'-O-Methyl-guanosine
  modified_base 57: mod_base = OTHER; note = 2'-O-Methyl-adenosine
  modified_base 61: mod_base = OTHER; note = 2'-O-Methyl-cytidine
  modified_base 66: mod_base = OTHER; note = 2'-O-Methyl-uridine
  modified_base 67: mod_base = OTHER; note = 2'-O-Methyl-cytidine
  modified_base 70: mod_base = OTHER; note = 2'-O-Methyl-cytidine
  modified_base 71: mod_base = OTHER; note = 2'-O-Methyl-uridine
  modified_base 72: mod_base = OTHER; note = 2'-O-Methyl-uridine
  modified_base 73: mod_base = OTHER; note = 2'-O-Methyl-guanosine
  modified_base 74: mod_base = OTHER; note = 2'-O-Methyl-adenosine
  modified_base 75: mod_base = OTHER; note = 2'-O-Methyl-adenosine
  modified_base 76: mod_base = OTHER; note = 2'-O-Methyl-adenosine
  modified_base 77: mod_base = OTHER; note = 2'-O-Methyl-adenosine
  modified_base 78: mod_base = OTHER; note = 2'-O-Methyl-adenosine
  modified_base 79: mod_base = OTHER; note = 2'-O-Methyl-guanosine
  modified_base 80: mod_base = OTHER; note = 2'-O-Methyl-uridine
  modified_base 82: mod_base = OTHER; note = 2'-O-Methyl-guanosine
  modified_base 83: mod_base = OTHER; note = 2'-O-Methyl-cytidine
  modified_base 84: mod_base = OTHER; note = 2'-O-Methyl-adenosine
  modified_base 85: mod_base = OTHER; note = 2'-O-Methyl-cytidine
  modified_base 86: mod_base = OTHER; note = 2'-O-Methyl-cytidine
  modified_base 87: mod_base = OTHER; note = 2'-O-Methyl-guanosine
  modified_base 89: mod_base = OTHER; note = 2'-O-Methyl-guanosine
  modified_base 92: mod_base = OTHER; note = 2'-O-Methyl-guanosine
  modified_base 93: mod_base = OTHER; note = 2'-O-Methyl-guanosine
  modified_base 94: mod_base = OTHER; note = 2'-O-Methyl-uridine
  modified_base 95: mod_base = OTHER; note = 2'-O-Methyl-guanosine
  modified_base 96: mod_base = OTHER; note = 2'-O-Methyl-cytidine
  modified_base 97: mod_base = OTHER; note = 2'-O-Methyl-uridine
  modified_base 98: mod_base = OTHER; note = 2'-O-Methyl-uridine phosphorothioate
  modified_base 99: mod_base = OTHER; note = 2'-O-Methyl-uridine phosphorothioate
  modified_base 100: mod_base = OTHER; note = 2'-O-Methyl-uridine
  misc_difference 101: note = a, c, g, inosine, u, deoxyadenosine, deoxyguanosine, deoxycytidine, deoxyinosine, thymine, ribonebularine, 2'-O-methylnebularine, or 2'-deoxynebularine
  misc_difference 102: note = a, c, g, inosine, u, deoxyadenosine, deoxyguanosine, deoxycytidine, deoxyinosine, thymine, ribonebularine, 2'-O-methylnebularine, or 2'-deoxynebularine
  misc_difference 103: note = a, c, g, inosine, u, deoxyadenosine, deoxyguanosine, deoxycytidine, deoxyinosine, thymine, ribonebularine, 2'-O-methylnebularine, or 2'-deoxynebularine

SEQ ID NO: 3084 - RNA, 103 nt, synthetic construct; identical to SEQ ID NO: 1797
  source 1..103: mol_type = other RNA
  modified_base 1: mod_base = OTHER; note = 2'-O-Methyl-cytidine phosphorothioate
  modified_base 2: mod_base = OTHER; note = 2'-O-Methyl-adenosine phosphorothioate
  modified_base 3: mod_base = OTHER; note = 2'-O-Methyl-guanosine
  modified_base 21: mod_base = OTHER; note = 2'-O-Methyl-guanosine
  modified_base 25: mod_base = OTHER; note = uridine phosphorothioate
  modified_base 28: mod_base = OTHER; note = 2'-O-Methyl-adenosine
  modified_base 29: mod_base = OTHER; note = 2'-O-Methyl-guanosine
  modified_base 30: mod_base = OTHER; note = 2'-O-Methyl-cytidine
  modified_base 31: mod_base = OTHER; note = 2'-O-Methyl-uridine
  modified_base 32: mod_base = OTHER; note = 2'-O-Methyl-adenosine
  modified_base 34: mod_base = OTHER; note = 2'-O-Methyl-adenosine
  modified_base 35: mod_base = OTHER; note = 2'-O-Methyl-adenosine
  modified_base 36: mod_base = OTHER; note = 2'-O-Methyl-adenosine
  modified_base 37: mod_base = OTHER; note = 2'-O-Methyl-uridine
  modified_base 38: mod_base = OTHER; note = 2'-O-Methyl-adenosine
  modified_base 39: mod_base = OTHER; note = 2'-O-Methyl-guanosine
  modified_base 40: mod_base = OTHER; note = 2'-O-Methyl-cytidine
  modified_base 41: mod_base = OTHER; note = 2'-O-Methyl-adenosine
  modified_base 42: mod_base = OTHER; note = 2'-O-Methyl-adenosine
  modified_base 45: mod_base = OTHER; note = uridine phosphorothioate
  modified_base 46: mod_base = OTHER; note = 2'-O-Methyl-adenosine
  modified_base 48: mod_base = OTHER; note = 2'-O-Methyl-adenosine
  modified_base 50: mod_base = OTHER; note = 2'-O-Methyl-uridine
  modified_base 52: mod_base = OTHER; note = 2'-O-Methyl-adenosine
  modified_base 53: mod_base = OTHER; note = 2'-O-Methyl-guanosine
  modified_base 54: mod_base = OTHER; note = 2'-O-Methyl-guanosine
  modified_base 57: mod_base = OTHER; note = 2'-O-Methyl-adenosine
  modified_base 61: mod_base = OTHER; note = 2'-O-Methyl-cytidine
  modified_base 66: mod_base = OTHER; note = 2'-O-Methyl-uridine
  modified_base 67: mod_base = OTHER; note = 2'-O-Methyl-cytidine
  modified_base 70: mod_base = OTHER; note = 2'-O-Methyl-cytidine
  modified_base 71: mod_base = OTHER; note = 2'-O-Methyl-uridine
  modified_base 72: mod_base = OTHER; note = 2'-O-Methyl-uridine
  modified_base 73: mod_base = OTHER; note = 2'-O-Methyl-guanosine
  modified_base 74: mod_base = OTHER; note = 2'-O-Methyl-adenosine
  modified_base 75: mod_base = OTHER; note = 2'-O-Methyl-adenosine
  modified_base 76: mod_base = OTHER; note = 2'-O-Methyl-adenosine
  modified_base 77: mod_base = OTHER; note = 2'-O-Methyl-adenosine
  modified_base 78: mod_base = OTHER; note = 2'-O-Methyl-adenosine
  modified_base 79: mod_base = OTHER; note = 2'-O-Methyl-guanosine
  modified_base 80: mod_base = OTHER; note = 2'-O-Methyl-uridine
  modified_base 82: mod_base = OTHER; note = 2'-O-Methyl-guanosine
  modified_base 83: mod_base = OTHER; note = 2'-O-Methyl-cytidine
  modified_base 84: mod_base = OTHER; note = 2'-O-Methyl-adenosine
  modified_base 85: mod_base = OTHER; note = 2'-O-Methyl-cytidine
  modified_base 86: mod_base = OTHER; note = 2'-O-Methyl-cytidine
  modified_base 87: mod_base = OTHER; note = 2'-O-Methyl-guanosine
  modified_base 89: mod_base = OTHER; note = 2'-O-Methyl-guanosine
  modified_base 91: mod_base = OTHER; note = 2'-O-Methyl-cytidine
  modified_base 92: mod_base = OTHER; note = 2'-O-Methyl-guanosine
  modified_base 93: mod_base = OTHER; note = 2'-O-Methyl-guanosine
  modified_base 94: mod_base = OTHER; note = 2'-O-Methyl-uridine
  modified_base 95: mod_base = OTHER; note = 2'-O-Methyl-guanosine
  modified_base 96: mod_base = OTHER; note = 2'-O-Methyl-cytidine
  modified_base 97: mod_base = OTHER; note = 2'-O-Methyl-uridine
  modified_base 98: mod_base = OTHER; note = 2'-O-Methyl-uridine phosphorothioate
  modified_base 99: mod_base = OTHER; note = 2'-O-Methyl-uridine phosphorothioate
  modified_base 100: mod_base = OTHER; note = 2'-O-Methyl-uridine
  misc_difference 101: note = a, c, g, inosine, u, deoxyadenosine, deoxyguanosine, deoxycytidine, deoxyinosine, thymine, ribonebularine, 2'-O-methylnebularine, or 2'-deoxynebularine
  misc_difference 102: note = a, c, g, inosine, u, deoxyadenosine, deoxyguanosine, deoxycytidine, deoxyinosine, thymine, ribonebularine, 2'-O-methylnebularine, or 2'-deoxynebularine
  misc_difference 103: note = a, c, g, inosine, u, deoxyadenosine, deoxyguanosine, deoxycytidine, deoxyinosine, thymine, ribonebularine, 2'-O-methylnebularine, or 2'-deoxynebularine

SEQ ID NO: 3085 - RNA, 103 nt, synthetic construct; identical to SEQ ID NO: 1797
  source 1..103: mol_type = other RNA
  modified_base 1: mod_base = OTHER; note = 2'-O-Methyl-cytidine phosphorothioate
  modified_base 2: mod_base = OTHER; note = 2'-O-Methyl-adenosine phosphorothioate
  modified_base 3: mod_base = OTHER; note = 2'-O-Methyl-guanosine
  modified_base 21: mod_base = OTHER; note = 2'-O-Methyl-guanosine
  modified_base 25: mod_base = OTHER; note = uridine phosphorothioate
  modified_base 28: mod_base = OTHER; note = 2'-O-Methyl-adenosine
  modified_base 29: mod_base = OTHER; note = 2'-O-Methyl-guanosine
  modified_base 30: mod_base = OTHER; note = 2'-O-Methyl-cytidine
  modified_base 31: mod_base = OTHER; note = 2'-O-Methyl-uridine
  modified_base 32: mod_base = OTHER; note = 2'-O-Methyl-adenosine
  modified_base 34: mod_base = OTHER; note = 2'-O-Methyl-adenosine
  modified_base 35: mod_base = OTHER; note = 2'-O-Methyl-adenosine
  modified_base 36: mod_base = OTHER; note = 2'-O-Methyl-adenosine
  modified_base 37: mod_base = OTHER; note = 2'-O-Methyl-uridine
  modified_base 38: mod_base = OTHER; note = 2'-O-Methyl-adenosine
  modified_base 39: mod_base = OTHER; note = 2'-O-Methyl-guanosine
  modified_base 40: mod_base = OTHER; note = 2'-O-Methyl-cytidine
  modified_base 41: mod_base = OTHER; note = 2'-O-Methyl-adenosine
  modified_base 42: mod_base = OTHER; note = 2'-O-Methyl-adenosine
  modified_base 45: mod_base = OTHER; note = uridine phosphorothioate
  modified_base 46: mod_base = OTHER; note = 2'-O-Methyl-adenosine
  modified_base 48: mod_base = OTHER; note = 2'-O-Methyl-adenosine
  modified_base 50: mod_base = OTHER; note = 2'-O-Methyl-uridine
  modified_base 52: mod_base = OTHER; note = 2'-O-Methyl-adenosine
  modified_base 53: mod_base = OTHER; note = 2'-O-Methyl-guanosine
  modified_base 54: mod_base = OTHER; note = 2'-O-Methyl-guanosine
  modified_base 55: mod_base = OTHER; note = 2'-O-Methyl-cytidine
  modified_base 56: mod_base = OTHER; note = 2'-O-Methyl-uridine
  modified_base 57: mod_base = OTHER; note = 2'-O-Methyl-adenosine
  modified_base 60: mod_base = OTHER; note = 2'-O-Methyl-cytidine
  modified_base 61: mod_base = OTHER; note = 2'-O-Methyl-cytidine
  modified_base 66: mod_base = OTHER; note = 2'-O-Methyl-uridine
  modified_base 67: mod_base = OTHER; note = 2'-O-Methyl-cytidine
  modified_base 70: mod_base = OTHER; note = 2'-O-Methyl-cytidine
  modified_base 71: mod_base = OTHER; note = 2'-O-Methyl-uridine
  modified_base 72: mod_base = OTHER; note = 2'-O-Methyl-uridine
  modified_base 74: mod_base = OTHER; note = 2'-O-Methyl-adenosine
  modified_base 75: mod_base = OTHER; note = 2'-O-Methyl-adenosine
  modified_base 76: mod_base = OTHER; note = 2'-O-Methyl-adenosine
  modified_base 77: mod_base = OTHER; note = 2'-O-Methyl-adenosine
  modified_base 78: mod_base = OTHER; note = 2'-O-Methyl-adenosine
  modified_base 79: mod_base = OTHER; note = 2'-O-Methyl-guanosine
  modified_base 80: mod_base = OTHER; note = 2'-O-Methyl-uridine
  modified_base 82: mod_base = OTHER; note = 2'-O-Methyl-guanosine
  modified_base 83: mod_base = OTHER; note = 2'-O-Methyl-cytidine
  modified_base 84: mod_base = OTHER; note = 2'-O-Methyl-adenosine
  modified_base 85: mod_base = OTHER; note = 2'-O-Methyl-cytidine
  modified_base 86: mod_base = OTHER; note = 2'-O-Methyl-cytidine
  modified_base 87: mod_base = OTHER; note = 2'-O-Methyl-guanosine
  modified_base 89: mod_base = OTHER; note = 2'-O-Methyl-guanosine
  modified_base 92: mod_base = OTHER; note = 2'-O-Methyl-guanosine
  modified_base 93: mod_base = OTHER; note = 2'-O-Methyl-guanosine
  modified_base 94: mod_base = OTHER; note = 2'-O-Methyl-uridine
  modified_base 95: mod_base = OTHER; note = 2'-O-Methyl-guanosine
  modified_base 96: mod_base = OTHER; note = 2'-O-Methyl-cytidine
  modified_base 97: mod_base = OTHER; note = 2'-O-Methyl-uridine
  modified_base 98: mod_base = OTHER; note = 2'-O-Methyl-uridine phosphorothioate
  modified_base 99: mod_base = OTHER; note = 2'-O-Methyl-uridine phosphorothioate
  modified_base 100: mod_base = OTHER; note = 2'-O-Methyl-uridine
  misc_difference 101: note = a, c, g, inosine, u, deoxyadenosine, deoxyguanosine, deoxycytidine, deoxyinosine, thymine, ribonebularine, 2'-O-methylnebularine, or 2'-deoxynebularine
  misc_difference 102: note = a, c, g, inosine, u, deoxyadenosine, deoxyguanosine, deoxycytidine, deoxyinosine, thymine, ribonebularine, 2'-O-methylnebularine, or 2'-deoxynebularine
  misc_difference 103: note = a, c, g, inosine, u, deoxyadenosine, deoxyguanosine, deoxycytidine, deoxyinosine, thymine, ribonebularine, 2'-O-methylnebularine, or 2'-deoxynebularine

SEQ ID NO: 3086 - RNA, 103 nt, synthetic construct; identical to SEQ ID NO: 1795
  source 1..103: mol_type = other RNA
  modified_base 1: mod_base = OTHER; note = 2'-O-Methyl-cytidine phosphorothioate
  modified_base 2: mod_base = OTHER; note = 2'-O-Methyl-cytidine phosphorothioate
  modified_base 3: mod_base = OTHER; note = 2'-O-Methyl-cytidine
  modified_base 21: mod_base = OTHER; note = 2'-O-Methyl-guanosine
  modified_base 25: mod_base = OTHER; note = uridine phosphorothioate
  modified_base 28: mod_base = OTHER; note = 2'-O-Methyl-adenosine
  modified_base 29: mod_base = OTHER; note = 2'-O-Methyl-guanosine
  modified_base 30: mod_base = OTHER; note = 2'-O-Methyl-cytidine
  modified_base 31: mod_base = OTHER; note = 2'-O-Methyl-uridine
  modified_base 32: mod_base = OTHER; note = 2'-O-Methyl-adenosine
  modified_base 33: mod_base = OTHER; note = 2'-O-Methyl-guanosine
  modified_base 34: mod_base = OTHER; note = 2'-O-Methyl-adenosine
  modified_base 35: mod_base = OTHER; note = 2'-O-Methyl-adenosine
  modified_base 36: mod_base = OTHER; note = 2'-O-Methyl-adenosine
  modified_base 37: mod_base = OTHER; note = 2'-O-Methyl-uridine
  modified_base 38: mod_base = OTHER; note = 2'-O-Methyl-adenosine
  modified_base 39: mod_base = OTHER; note = 2'-O-Methyl-guanosine
  modified_base 40: mod_base = OTHER; note = 2'-O-Methyl-cytidine
  modified_base 41: mod_base = OTHER; note = 2'-O-Methyl-adenosine
  modified_base 42: mod_base = OTHER; note = 2'-O-Methyl-adenosine
  modified_base 46: mod_base = OTHER; note = 2'-O-Methyl-adenosine
  modified_base 48: mod_base = OTHER; note = 2'-O-Methyl-adenosine
  modified_base 50: mod_base = OTHER; note = 2'-O-Methyl-uridine
  modified_base 52: mod_base = OTHER; note = 2'-O-Methyl-adenosine
  modified_base 53: mod_base = OTHER; note = 2'-O-Methyl-guanosine
  modified_base 54: mod_base = OTHER; note = 2'-O-Methyl-guanosine
  modified_base 55: mod_base = OTHER; note = 2'-O-Methyl-cytidine
  modified_base 56: mod_base = OTHER; note = 2'-O-Methyl-uridine
  modified_base 57: mod_base = OTHER; note = 2'-O-Methyl-adenosine
  modified_base 60: mod_base = OTHER; note = 2'-O-Methyl-cytidine
  modified_base 61: mod_base = OTHER; note = 2'-O-Methyl-cytidine
  modified_base 64: mod_base = OTHER; note = uridine phosphorothioate
  modified_base 66: mod_base = OTHER; note = 2'-O-Methyl-uridine
  modified_base 67: mod_base = OTHER; note = 2'-O-Methyl-cytidine
  modified_base 70: mod_base = OTHER; note = 2'-O-Methyl-cytidine
  modified_base 71: mod_base = OTHER; note = 2'-O-Methyl-uridine
  modified_base 72: mod_base = OTHER; note = 2'-O-Methyl-uridine
  modified_base 73: mod_base = OTHER; note = 2'-O-Methyl-guanosine
  modified_base 74: mod_base = OTHER; note = 2'-O-Methyl-adenosine
  modified_base 75: mod_base = OTHER; note = 2'-O-Methyl-adenosine
  modified_base 76: mod_base = OTHER; note = 2'-O-Methyl-adenosine
  modified_base 77: mod_base = OTHER; note = 2'-O-Methyl-adenosine
  modified_base 78: mod_base = OTHER; note = 2'-O-Methyl-adenosine
  modified_base 79: mod_base = OTHER; note = 2'-O-Methyl-guanosine
  modified_base 80: mod_base = OTHER; note = 2'-O-Methyl-uridine
  modified_base 81: mod_base = OTHER; note = 2'-O-Methyl-guanosine
  modified_base 83: mod_base = OTHER; note = 2'-O-Methyl-cytidine
  modified_base 84: mod_base = OTHER; note = 2'-O-Methyl-adenosine
  modified_base 85: mod_base = OTHER; note = 2'-O-Methyl-cytidine
  modified_base 86: mod_base = OTHER; note = 2'-O-Methyl-cytidine
  modified_base 87: mod_base = OTHER; note = 2'-O-Methyl-guanosine
  modified_base 88: mod_base = OTHER; note = 2'-O-Methyl-adenosine
  modified_base 89: mod_base = OTHER; note = 2'-O-Methyl-guanosine
  modified_base 90: mod_base = OTHER; note = 2'-O-Methyl-uridine
  modified_base 91: mod_base = OTHER; note = 2'-O-Methyl-cytidine
  modified_base 92: mod_base = OTHER; note = 2'-O-Methyl-guanosine
  modified_base 93: mod_base = OTHER; note = 2'-O-Methyl-guanosine
  modified_base 94: mod_base = OTHER; note = 2'-O-Methyl-uridine
  modified_base 95: mod_base = OTHER; note = 2'-O-Methyl-guanosine
  modified_base 96: mod_base = OTHER; note = 2'-O-Methyl-cytidine
  modified_base 97: mod_base = OTHER; note = 2'-O-Methyl-uridine
  modified_base 98: mod_base = OTHER; note = 2'-O-Methyl-uridine phosphorothioate
  modified_base 99: mod_base = OTHER; note = 2'-O-Methyl-uridine phosphorothioate
  modified_base 100: mod_base = OTHER; note = 2'-O-Methyl-uridine
  misc_difference 101: note = a, c, g, inosine, u, deoxyadenosine, deoxyguanosine, deoxycytidine, deoxyinosine, thymine, ribonebularine, 2'-O-methylnebularine, or 2'-deoxynebularine
  misc_difference 102: note = a, c, g, inosine, u, deoxyadenosine, deoxyguanosine, deoxycytidine, deoxyinosine, thymine, ribonebularine, 2'-O-methylnebularine, or 2'-deoxynebularine
  misc_difference 103: note = a, c, g, inosine, u, deoxyadenosine, deoxyguanosine, deoxycytidine, deoxyinosine, thymine, ribonebularine, 2'-O-methylnebularine, or 2'-deoxynebularine

SEQ ID NO: 3087 - RNA, 103 nt, synthetic construct; identical to SEQ ID NO: 1795
  source 1..103: mol_type = other RNA
  modified_base 1: mod_base = OTHER; note = 2'-O-Methyl-cytidine phosphorothioate
  modified_base 2: mod_base = OTHER; note = 2'-O-Methyl-cytidine phosphorothioate
  modified_base 3: mod_base = OTHER; note = 2'-O-Methyl-cytidine
  modified_base 21: mod_base = OTHER; note = 2'-O-Methyl-guanosine
  modified_base 25: mod_base = OTHER; note = uridine phosphorothioate
  modified_base 28: mod_base = OTHER; note = 2'-O-Methyl-adenosine
  modified_base 29: mod_base = OTHER; note = 2'-O-Methyl-guanosine
  modified_base 30: mod_base = OTHER; note = 2'-O-Methyl-cytidine
  modified_base 31: mod_base = OTHER; note = 2'-O-Methyl-uridine
  modified_base 32: mod_base = OTHER; note = 2'-O-Methyl-adenosine
  modified_base 34: mod_base = OTHER; note = 2'-O-Methyl-adenosine
  modified_base 35: mod_base = OTHER; note = 2'-O-Methyl-adenosine
  modified_base 36: mod_base = OTHER; note = 2'-O-Methyl-adenosine
  modified_base 37: mod_base = OTHER; note = 2'-O-Methyl-uridine
  modified_base 38: mod_base = OTHER; note = 2'-O-Methyl-adenosine
  modified_base 39: mod_base = OTHER; note = 2'-O-Methyl-guanosine
  modified_base 40: mod_base = OTHER; note = 2'-O-Methyl-cytidine
  modified_base 41: mod_base = OTHER; note = 2'-O-Methyl-adenosine
  modified_base 42: mod_base = OTHER; note = 2'-O-Methyl-adenosine
  modified_base 46: mod_base = OTHER; note = 2'-O-Methyl-adenosine
  modified_base 48: mod_base = OTHER; note = 2'-O-Methyl-adenosine
  modified_base 50: mod_base = OTHER; note = 2'-O-Methyl-uridine
  modified_base 52: mod_base = OTHER; note = 2'-O-Methyl-adenosine
  modified_base 53: mod_base = OTHER; note = 2'-O-Methyl-guanosine
  modified_base 54: mod_base = OTHER; note = 2'-O-Methyl-guanosine
  modified_base 55: mod_base = OTHER; note = 2'-O-Methyl-cytidine
  modified_base 56: mod_base = OTHER; note = 2'-O-Methyl-uridine
  modified_base 57: mod_base = OTHER; note = 2'-O-Methyl-adenosine
  modified_base 60: mod_base = OTHER; note = 2'-O-Methyl-cytidine
  modified_base 61: mod_base = OTHER; note = 2'-O-Methyl-cytidine
  modified_base 64: mod_base = OTHER; note = uridine phosphorothioate
  modified_base 66: mod_base = OTHER; note = 2'-O-Methyl-uridine
  modified_base 67: mod_base = OTHER; note = 2'-O-Methyl-cytidine
  modified_base 70: mod_base = OTHER; note = 2'-O-Methyl-cytidine
  modified_base 71: mod_base = OTHER; note = 2'-O-Methyl-uridine
  modified_base 72: mod_base = OTHER; note = 2'-O-Methyl-uridine
  modified_base 74: mod_base = OTHER; note = 2'-O-Methyl-adenosine
  modified_base 75: mod_base = OTHER; note = 2'-O-Methyl-adenosine
  modified_base 76: mod_base = OTHER; note = 2'-O-Methyl-adenosine
  modified_base 77: mod_base = OTHER; note = 2'-O-Methyl-adenosine
  modified_base 78: mod_base = OTHER; note = 2'-O-Methyl-adenosine
  modified_base 79: mod_base = OTHER; note = 2'-O-Methyl-guanosine
  modified_base 80: mod_base = OTHER; note = 2'-O-Methyl-uridine
  modified_base 81: mod_base = OTHER; note = 2'-O-Methyl-guanosine
  modified_base 83: mod_base = OTHER; note = 2'-O-Methyl-cytidine
  modified_base 84: mod_base = OTHER; note = 2'-O-Methyl-adenosine
  modified_base 85: mod_base = OTHER; note = 2'-O-Methyl-cytidine
  modified_base 86: mod_base = OTHER; note = 2'-O-Methyl-cytidine
  modified_base 87: mod_base = OTHER; note = 2'-O-Methyl-guanosine
  modified_base 88: mod_base = OTHER; note = 2'-O-Methyl-adenosine
  modified_base 89: mod_base = OTHER; note = 2'-O-Methyl-guanosine
  modified_base 90: mod_base = OTHER; note = 2'-O-Methyl-uridine
  modified_base 91: mod_base = OTHER; note = 2'-O-Methyl-cytidine
  modified_base 92: mod_base = OTHER; note = 2'-O-Methyl-guanosine
  modified_base 93: mod_base = OTHER; note = 2'-O-Methyl-guanosine
  modified_base 94: mod_base = OTHER; note = 2'-O-Methyl-uridine
  modified_base 95: mod_base = OTHER; note = 2'-O-Methyl-guanosine
  modified_base 96: mod_base = OTHER; note = 2'-O-Methyl-cytidine
  modified_base 97: mod_base = OTHER; note = 2'-O-Methyl-uridine
  modified_base 98: mod_base = OTHER; note = 2'-O-Methyl-uridine phosphorothioate
  modified_base 99: mod_base = OTHER; note = 2'-O-Methyl-uridine phosphorothioate
  modified_base 100: mod_base = OTHER; note = 2'-O-Methyl-uridine
  misc_difference 101: note = a, c, g, inosine, u, deoxyadenosine, deoxyguanosine, deoxycytidine, deoxyinosine, thymine, ribonebularine, 2'-O-methylnebularine, or 2'-deoxynebularine
  misc_difference 102: note = a, c, g, inosine, u, deoxyadenosine, deoxyguanosine, deoxycytidine, deoxyinosine, thymine, ribonebularine, 2'-O-methylnebularine, or 2'-deoxynebularine
  misc_difference 103: note = a, c, g, inosine, u, deoxyadenosine, deoxyguanosine, deoxycytidine, deoxyinosine, thymine, ribonebularine, 2'-O-methylnebularine, or 2'-deoxynebularine

SEQ ID NO: 3088 - RNA, 103 nt, synthetic construct; identical to SEQ ID NO: 1796
  source 1..103: mol_type = other RNA
  modified_base 1: mod_base = OTHER; note = 2'-O-Methyl-guanosine phosphorothioate
  modified_base 2: mod_base = OTHER; note = 2'-O-Methyl-adenosine phosphorothioate
  modified_base 3: mod_base = OTHER; note = 2'-O-Methyl-guanosine
  modified_base 21: mod_base = OTHER; note = 2'-O-Methyl-guanosine
  modified_base 25: mod_base = OTHER; note = uridine phosphorothioate
  modified_base 28: mod_base = OTHER; note = 2'-O-Methyl-adenosine
  modified_base 29: mod_base = OTHER; note = 2'-O-Methyl-guanosine
  modified_base 30: mod_base = OTHER; note = 2'-O-Methyl-cytidine
  modified_base 31: mod_base = OTHER; note = 2'-O-Methyl-uridine
  modified_base 32: mod_base = OTHER; note = 2'-O-Methyl-adenosine
  modified_base 33: mod_base = OTHER; note = 2'-O-Methyl-guanosine
  modified_base 34: mod_base = OTHER; note = 2'-O-Methyl-adenosine
  modified_base 35: mod_base = OTHER; note = 2'-O-Methyl-adenosine
  modified_base 36: mod_base = OTHER; note = 2'-O-Methyl-adenosine
  modified_base 37: mod_base = OTHER; note = 2'-O-Methyl-uridine
  modified_base 38: mod_base = OTHER; note = 2'-O-Methyl-adenosine
  modified_base 39: mod_base = OTHER; note = 2'-O-Methyl-guanosine
  modified_base 40: mod_base = OTHER; note = 2'-O-Methyl-cytidine
  modified_base 41: mod_base = OTHER; note = 2'-O-Methyl-adenosine
  modified_base 42: mod_base = OTHER; note = 2'-O-Methyl-adenosine
  modified_base 46: mod_base = OTHER; note = 2'-O-Methyl-adenosine
  modified_base 48: mod_base = OTHER; note = 2'-O-Methyl-adenosine
  modified_base 50: mod_base = OTHER; note = 2'-O-Methyl-uridine
  modified_base 52: mod_base = OTHER; note = 2'-O-Methyl-adenosine
  modified_base 53: mod_base = OTHER; note = 2'-O-Methyl-guanosine
  modified_base 54: mod_base = OTHER; note = 2'-O-Methyl-guanosine
  modified_base 55: mod_base = OTHER; note = 2'-O-Methyl-cytidine
  modified_base 56: mod_base = OTHER; note = 2'-O-Methyl-uridine
  modified_base 57: mod_base = OTHER; note = 2'-O-Methyl-adenosine
  modified_base 60: mod_base = OTHER; note = 2'-O-Methyl-cytidine
  modified_base 61: mod_base = OTHER; note = 2'-O-Methyl-cytidine
  modified_base 64: mod_base = OTHER; note = uridine phosphorothioate
  modified_base 66: mod_base = OTHER; note = 2'-O-Methyl-uridine
  modified_base 67: mod_base = OTHER; note = 2'-O-Methyl-cytidine
  modified_base 70: mod_base = OTHER; note = 2'-O-Methyl-cytidine
  modified_base 71: mod_base = OTHER; note = 2'-O-Methyl-uridine
  modified_base 72: mod_base = OTHER; note = 2'-O-Methyl-uridine
  modified_base 73: mod_base = OTHER; note = 2'-O-Methyl-guanosine
  modified_base 74: mod_base = OTHER; note = 2'-O-Methyl-adenosine
  modified_base 75: mod_base = OTHER; note = 2'-O-Methyl-adenosine
  modified_base 76: mod_base = OTHER; note = 2'-O-Methyl-adenosine
  modified_base 77: mod_base = OTHER; note = 2'-O-Methyl-adenosine
  modified_base 78: mod_base = OTHER; note = 2'-O-Methyl-adenosine
  modified_base 79: mod_base = OTHER; note = 2'-O-Methyl-guanosine
  modified_base 80: mod_base = OTHER; note = 2'-O-Methyl-uridine
  modified_base 81: mod_base = OTHER; note = 2'-O-Methyl-guanosine
  modified_base 83: mod_base = OTHER; note = 2'-O-Methyl-cytidine
  modified_base 84: mod_base = OTHER; note = 2'-O-Methyl-adenosine
  modified_base 85: mod_base = OTHER; note = 2'-O-Methyl-cytidine
  modified_base 86: mod_base = OTHER; note = 2'-O-Methyl-cytidine
  modified_base 87: mod_base = OTHER; note = 2'-O-Methyl-guanosine
  modified_base 88: mod_base = OTHER; note = 2'-O-Methyl-adenosine
  modified_base 89: mod_base = OTHER; note = 2'-O-Methyl-guanosine
  modified_base 90: mod_base = OTHER; note = 2'-O-Methyl-uridine
  modified_base 91: mod_base = OTHER; note = 2'-O-Methyl-cytidine
  modified_base 92: mod_base = OTHER; note = 2'-O-Methyl-guanosine
  modified_base 93: mod_base = OTHER; note = 2'-O-Methyl-guanosine
  modified_base 94: mod_base = OTHER; note = 2'-O-Methyl-uridine
  modified_base 95: mod_base = OTHER; note = 2'-O-Methyl-guanosine
  modified_base 96: mod_base = OTHER; note = 2'-O-Methyl-cytidine
  modified_base 97: mod_base = OTHER; note = 2'-O-Methyl-uridine
  modified_base 98: mod_base = OTHER; note = 2'-O-Methyl-uridine phosphorothioate
  modified_base 99: mod_base = OTHER; note = 2'-O-Methyl-uridine phosphorothioate
  modified_base 100: mod_base = OTHER; note = 2'-O-Methyl-uridine
  misc_difference 101: note = a, c, g, inosine, u, deoxyadenosine, deoxyguanosine, deoxycytidine, deoxyinosine, thymine, ribonebularine, 2'-O-methylnebularine, or 2'-deoxynebularine
  misc_difference 102: note = a, c, g, inosine, u, deoxyadenosine, deoxyguanosine, deoxycytidine, deoxyinosine, thymine, ribonebularine, 2'-O-methylnebularine, or 2'-deoxynebularine
  misc_difference 103: note = a, c, g, inosine, u, deoxyadenosine, deoxyguanosine, deoxycytidine, deoxyinosine, thymine, ribonebularine, 2'-O-methylnebularine, or 2'-deoxynebularine

SEQ ID NO: 3089 - RNA, 103 nt, synthetic construct; identical to SEQ ID NO: 1796
  source 1..103: mol_type = other RNA
  modified_base 1: mod_base = OTHER; note = 2'-O-Methyl-guanosine phosphorothioate
  modified_base 2: mod_base = OTHER; note = 2'-O-Methyl-adenosine phosphorothioate
  modified_base 3: mod_base = OTHER; note = 2'-O-Methyl-guanosine
  modified_base 21: mod_base = OTHER; note = 2'-O-Methyl-guanosine
  modified_base 25: mod_base = OTHER; note = uridine phosphorothioate
  modified_base 28: mod_base = OTHER; note = 2'-O-Methyl-adenosine
  modified_base 29: mod_base = OTHER; note = 2'-O-Methyl-guanosine
  modified_base 30: mod_base = OTHER; note = 2'-O-Methyl-cytidine
  modified_base 31: mod_base = OTHER; note = 2'-O-Methyl-uridine
  modified_base 32: mod_base = OTHER; note = 2'-O-Methyl-adenosine
  modified_base 34: mod_base = OTHER; note = 2'-O-Methyl-adenosine
  modified_base 35: mod_base = OTHER; note = 2'-O-Methyl-adenosine
  modified_base 36: mod_base = OTHER; note = 2'-O-Methyl-adenosine
  modified_base 37: mod_base = OTHER; note = 2'-O-Methyl-uridine
  modified_base 38: mod_base = OTHER; note = 2'-O-Methyl-adenosine
  modified_base 39: mod_base = OTHER; note = 2'-O-Methyl-guanosine
  modified_base 40: mod_base = OTHER; note = 2'-O-Methyl-cytidine
  modified_base 41: mod_base = OTHER; note = 2'-O-Methyl-adenosine
  modified_base 42: mod_base = OTHER; note = 2'-O-Methyl-adenosine
  modified_base 46: mod_base = OTHER; note = 2'-O-Methyl-adenosine
  modified_base 48: mod_base = OTHER; note = 2'-O-Methyl-adenosine
  modified_base 50: mod_base = OTHER; note = 2'-O-Methyl-uridine
  modified_base 52: mod_base = OTHER; note = 2'-O-Methyl-adenosine
  modified_base 53: mod_base = OTHER; note = 2'-O-Methyl-guanosine
  modified_base 54: mod_base = OTHER; note = 2'-O-Methyl-guanosine
  modified_base 55: mod_base = OTHER; note = 2'-O-Methyl-cytidine
  modified_base 56: mod_base = OTHER; note = 2'-O-Methyl-uridine
  modified_base 57: mod_base = OTHER; note = 2'-O-Methyl-adenosine
  modified_base 60: mod_base = OTHER; note = 2'-O-Methyl-cytidine
  modified_base 61: mod_base = OTHER; note = 2'-O-Methyl-cytidine
  modified_base 64: mod_base = OTHER; note = uridine phosphorothioate
  modified_base 66: mod_base = OTHER; note = 2'-O-Methyl-uridine
  modified_base 67: mod_base = OTHER; note = 2'-O-Methyl-cytidine
  modified_base 70: mod_base = OTHER; note = 2'-O-Methyl-cytidine
  modified_base 71: mod_base = OTHER; note = 2'-O-Methyl-uridine
  modified_base 72: mod_base = OTHER; note = 2'-O-Methyl-uridine
  modified_base 74: mod_base = OTHER; note = 2'-O-Methyl-adenosine
  modified_base 75: mod_base = OTHER; note = 2'-O-Methyl-adenosine
  modified_base 76: mod_base = OTHER; note = 2'-O-Methyl-adenosine
  modified_base 77: mod_base = OTHER; note = 2'-O-Methyl-adenosine
  modified_base 78: mod_base = OTHER; note = 2'-O-Methyl-adenosine
  modified_base 79: mod_base = OTHER; note = 2'-O-Methyl-guanosine
  modified_base 80: mod_base = OTHER; note = 2'-O-Methyl-uridine
  modified_base 81: mod_base = OTHER; note = 2'-O-Methyl-guanosine
  modified_base 83: mod_base = OTHER; note = 2'-O-Methyl-cytidine
  modified_base 84: mod_base = OTHER; note = 2'-O-Methyl-adenosine
  modified_base 85: mod_base = OTHER; note = 2'-O-Methyl-cytidine
  modified_base 86: mod_base = OTHER; note = 2'-O-Methyl-cytidine
  modified_base 87: mod_base = OTHER; note = 2'-O-Methyl-guanosine
  modified_base 88: mod_base = OTHER; note = 2'-O-Methyl-adenosine
  modified_base 89: mod_base = OTHER; note = 2'-O-Methyl-guanosine
  modified_base 90: mod_base = OTHER; note = 2'-O-Methyl-uridine
  modified_base 91: mod_base = OTHER; note = 2'-O-Methyl-cytidine
  modified_base 92: mod_base = OTHER; note = 2'-O-Methyl-guanosine
  modified_base 93: mod_base = OTHER; note = 2'-O-Methyl-guanosine
  modified_base 94: mod_base = OTHER; note = 2'-O-Methyl-uridine
  modified_base 95: mod_base = OTHER; note = 2'-O-Methyl-guanosine
  modified_base 96: mod_base = OTHER; note = 2'-O-Methyl-cytidine
  modified_base 97: mod_base = OTHER; note = 2'-O-Methyl-uridine
  modified_base 98: mod_base = OTHER; note = 2'-O-Methyl-uridine phosphorothioate
  modified_base 99: mod_base = OTHER; note = 2'-O-Methyl-uridine phosphorothioate
  modified_base 100: mod_base = OTHER; note = 2'-O-Methyl-uridine
  misc_difference 101: note = a, c, g, inosine, u, deoxyadenosine, deoxyguanosine, deoxycytidine, deoxyinosine, thymine, ribonebularine, 2'-O-methylnebularine, or 2'-deoxynebularine
  misc_difference 102: note = a, c, g, inosine, u, deoxyadenosine, deoxyguanosine, deoxycytidine, deoxyinosine, thymine, ribonebularine, 2'-O-methylnebularine, or 2'-deoxynebularine
  misc_difference 103: note = a, c, g, inosine, u, deoxyadenosine, deoxyguanosine, deoxycytidine, deoxyinosine, thymine, ribonebularine, 2'-O-methylnebularine, or 2'-deoxynebularine

SEQ ID NO: 3090 - RNA, 103 nt, synthetic construct; identical to SEQ ID NO: 1797
  source 1..103: mol_type = other RNA
  modified_base 1: mod_base = OTHER; note = 2'-O-Methyl-cytidine phosphorothioate
  modified_base 2: mod_base = OTHER; note = 2'-O-Methyl-adenosine phosphorothioate
  modified_base 3: mod_base = OTHER; note = 2'-O-Methyl-guanosine
  modified_base 21: mod_base = OTHER; note = 2'-O-Methyl-guanosine
  modified_base 25: mod_base = OTHER; note = uridine phosphorothioate
  modified_base 28: mod_base = OTHER; note = 2'-O-Methyl-adenosine
  modified_base 29: mod_base = OTHER; note = 2'-O-Methyl-guanosine
  modified_base 30: mod_base = OTHER; note = 2'-O-Methyl-cytidine
  modified_base 31: mod_base = OTHER; note = 2'-O-Methyl-uridine
  modified_base 32: mod_base = OTHER; note = 2'-O-Methyl-adenosine
  modified_base 33: mod_base = OTHER; note = 2'-O-Methyl-guanosine
  modified_base 34: mod_base = OTHER; note = 2'-O-Methyl-adenosine
  modified_base 35: mod_base = OTHER; note = 2'-O-Methyl-adenosine
  modified_base 36: mod_base = OTHER; note = 2'-O-Methyl-adenosine
  modified_base 37: mod_base = OTHER; note = 2'-O-Methyl-uridine
  modified_base 38: mod_base = OTHER; note = 2'-O-Methyl-adenosine
  modified_base 39: mod_base = OTHER; note = 2'-O-Methyl-guanosine
  modified_base 40: mod_base = OTHER; note = 2'-O-Methyl-cytidine
  modified_base 41: mod_base = OTHER; note = 2'-O-Methyl-adenosine
  modified_base 42: mod_base = OTHER; note = 2'-O-Methyl-adenosine
  modified_base 46: mod_base = OTHER; note = 2'-O-Methyl-adenosine
  modified_base 48: mod_base = OTHER; note = 2'-O-Methyl-adenosine
  modified_base 50: mod_base = OTHER; note = 2'-O-Methyl-uridine
  modified_base 52: mod_base = OTHER; note = 2'-O-Methyl-adenosine
  modified_base 53: mod_base = OTHER; note = 2'-O-Methyl-guanosine
  modified_base 54: mod_base = OTHER; note = 2'-O-Methyl-guanosine
  modified_base 57: mod_base = OTHER; note = 2'-O-Methyl-adenosine
  modified_base 61: mod_base = OTHER; note = 2'-O-Methyl-cytidine
  modified_base 64: mod_base = OTHER; note = uridine phosphorothioate
  modified_base 66: mod_base = OTHER; note = 2'-O-Methyl-uridine
  modified_base 67: mod_base = OTHER; note = 2'-O-Methyl-cytidine
  modified_base 70: mod_base = OTHER; note = 2'-O-Methyl-cytidine
  modified_base 71: mod_base = OTHER; note = 2'-O-Methyl-uridine
  modified_base 72: mod_base = OTHER; note = 2'-O-Methyl-uridine
  modified_base 74: mod_base = OTHER; note = 2'-O-Methyl-adenosine
  modified_base 75: mod_base = OTHER; note = 2'-O-Methyl-adenosine
  modified_base 76: mod_base = OTHER; note = 2'-O-Methyl-adenosine
  modified_base 77: mod_base = OTHER; note = 2'-O-Methyl-adenosine
  modified_base 78: mod_base = OTHER; note = 2'-O-Methyl-adenosine
  modified_base 79: mod_base = OTHER; note = 2'-O-Methyl-guanosine
  modified_base 80: mod_base = OTHER; note = 2'-O-Methyl-uridine
  modified_base 82: mod_base = OTHER; note = 2'-O-Methyl-guanosine
  modified_base 83: mod_base = OTHER; note = 2'-O-Methyl-cytidine
  modified_base 84: mod_base = OTHER; note = 2'-O-Methyl-adenosine
  modified_base 85: mod_base = OTHER; note = 2'-O-Methyl-cytidine
  modified_base 86: mod_base = OTHER; note = 2'-O-Methyl-cytidine
  modified_base 87: mod_base = OTHER; note = 2'-O-Methyl-guanosine
  modified_base 89: mod_base = OTHER; note = 2'-O-Methyl-guanosine
  modified_base 92: mod_base = OTHER; note = 2'-O-Methyl-guanosine
  modified_base 93: mod_base = OTHER; note = 2'-O-Methyl-guanosine
  modified_base 94: mod_base = OTHER; note = 2'-O-Methyl-uridine
  modified_base 95: mod_base = OTHER; note = 2'-O-Methyl-guanosine
  modified_base 96: mod_base = OTHER; note = 2'-O-Methyl-cytidine
  modified_base 97: mod_base = OTHER; note = 2'-O-Methyl-uridine
  modified_base 98: mod_base = OTHER; note = 2'-O-Methyl-uridine phosphorothioate
  modified_base 99: mod_base = OTHER; note = 2'-O-Methyl-uridine phosphorothioate
  modified_base 100: mod_base = OTHER; note = 2'-O-Methyl-uridine
  misc_difference 101: note = a, c, g, inosine, u, deoxyadenosine, deoxyguanosine, deoxycytidine, deoxyinosine, thymine, ribonebularine, 2'-O-methylnebularine, or 2'-deoxynebularine
  misc_difference 102: note = a, c, g, inosine, u, deoxyadenosine, deoxyguanosine, deoxycytidine, deoxyinosine, thymine, ribonebularine, 2'-O-methylnebularine, or 2'-deoxynebularine
  misc_difference 103: note = a, c, g, inosine, u, deoxyadenosine, deoxyguanosine, deoxycytidine, deoxyinosine, thymine, ribonebularine, 2'-O-methylnebularine, or 2'-deoxynebularine

SEQ ID NO: 3091 - RNA, 103 nt, synthetic construct; identical to SEQ ID NO: 1797
  source 1..103: mol_type = other RNA
  modified_base 1: mod_base = OTHER; note = 2'-O-Methyl-cytidine phosphorothioate
  modified_base 2: mod_base = OTHER; note = 2'-O-Methyl-adenosine phosphorothioate
  modified_base 3: mod_base = OTHER; note = 2'-O-Methyl-guanosine
  modified_base 21: mod_base = OTHER; note = 2'-O-Methyl-guanosine
  modified_base 25: mod_base = OTHER; note = uridine phosphorothioate
  modified_base 28: mod_base = OTHER; note = 2'-O-Methyl-adenosine
  modified_base 29: mod_base = OTHER; note = 2'-O-Methyl-guanosine
  modified_base 30: mod_base = OTHER; note = 2'-O-Methyl-cytidine
  modified_base 31: mod_base = OTHER; note = 2'-O-Methyl-uridine
  modified_base 32: mod_base = OTHER; note = 2'-O-Methyl-adenosine
  modified_base 33: mod_base = OTHER; note = 2'-O-Methyl-guanosine
  modified_base 34: mod_base = OTHER; note = 2'-O-Methyl-adenosine
  modified_base 35: mod_base = OTHER; note = 2'-O-Methyl-adenosine
  modified_base 36: mod_base = OTHER; note = 2'-O-Methyl-adenosine
  modified_base 37: mod_base = OTHER; note = 2'-O-Methyl-uridine
  modified_base 38: mod_base = OTHER; note = 2'-O-Methyl-adenosine
  modified_base 39: mod_base = OTHER; note = 2'-O-Methyl-guanosine
  modified_base 40: mod_base = OTHER; note = 2'-O-Methyl-cytidine
  modified_base 41: mod_base = OTHER; note = 2'-O-Methyl-adenosine
  modified_base 42: mod_base = OTHER; note = 2'-O-Methyl-adenosine
  modified_base 46: mod_base = OTHER; note = 2'-O-Methyl-adenosine
  modified_base 48: mod_base = OTHER; note = 2'-O-Methyl-adenosine
  modified_base 50: mod_base = OTHER; note = 2'-O-Methyl-uridine
  modified_base 52: mod_base = OTHER; note = 2'-O-Methyl-adenosine
  modified_base 53: mod_base = OTHER; note = 2'-O-Methyl-guanosine
  modified_base 54: mod_base = OTHER; note = 2'-O-Methyl-guanosine
  modified_base 55: mod_base = OTHER; note = 2'-O-Methyl-cytidine
  modified_base 56: mod_base = OTHER; note = 2'-O-Methyl-uridine
  modified_base 57: mod_base = OTHER; note = 2'-O-Methyl-adenosine
  modified_base 60: mod_base = OTHER; note = 2'-O-Methyl-cytidine
  modified_base 61: mod_base = OTHER; note = 2'-O-Methyl-cytidine
  modified_base 64: mod_base = OTHER; note = uridine phosphorothioate
  modified_base 66: mod_base = OTHER; note = 2'-O-Methyl-uridine
  modified_base 67: mod_base = OTHER; note = 2'-O-Methyl-cytidine
  modified_base 70: mod_base = OTHER; note = 2'-O-Methyl-cytidine
  modified_base 71: mod_base = OTHER; note = 2'-O-Methyl-uridine
  modified_base 72: mod_base = OTHER; note = 2'-O-Methyl-uridine
  modified_base 74: mod_base = OTHER; note = 2'-O-Methyl-adenosine
  modified_base 75: mod_base = OTHER; note = 2'-O-Methyl-adenosine
  modified_base 76: mod_base = OTHER; note = 2'-O-Methyl-adenosine
  modified_base 77: mod_base = OTHER; note = 2'-O-Methyl-adenosine
  modified_base 78: mod_base = OTHER; note = 2'-O-Methyl-adenosine
  modified_base 79: mod_base = OTHER; note = 2'-O-Methyl-guanosine
  modified_base 80: mod_base = OTHER; note = 2'-O-Methyl-uridine
  modified_base 82: mod_base = OTHER; note = 2'-O-Methyl-guanosine
  modified_base 83: mod_base = OTHER; note = 2'-O-Methyl-cytidine
  modified_base 84: mod_base = OTHER; note = 2'-O-Methyl-adenosine
  modified_base 85: mod_base = OTHER; note = 2'-O-Methyl-cytidine
  modified_base 86: mod_base = OTHER; note = 2'-O-Methyl-cytidine
  modified_base 87: mod_base = OTHER; note = 2'-O-Methyl-guanosine
  modified_base 89: mod_base = OTHER; note = 2'-O-Methyl-guanosine
  modified_base 92: mod_base = OTHER; note = 2'-O-Methyl-guanosine
  modified_base 93: mod_base = OTHER; note = 2'-O-Methyl-guanosine
  modified_base 94: mod_base = OTHER; note = 2'-O-Methyl-uridine
  modified_base 95: mod_base = OTHER; note = 2'-O-Methyl-guanosine
  modified_base 96: mod_base = OTHER; note = 2'-O-Methyl-cytidine
  modified_base 97: mod_base = OTHER; note = 2'-O-Methyl-uridine
  modified_base 98: mod_base = OTHER; note = 2'-O-Methyl-uridine phosphorothioate
  modified_base 99: mod_base = OTHER; note = 2'-O-Methyl-uridine phosphorothioate
  modified_base 100: mod_base = OTHER; note = 2'-O-Methyl-uridine
  misc_difference 101: note = a, c, g, inosine, u, deoxyadenosine, deoxyguanosine, deoxycytidine, deoxyinosine, thymine, ribonebularine, 2'-O-methylnebularine, or 2'-deoxynebularine
  misc_difference 102: note = a, c, g, inosine, u, deoxyadenosine, deoxyguanosine, deoxycytidine, deoxyinosine, thymine, ribonebularine, 2'-O-methylnebularine, or 2'-deoxynebularine
  misc_difference 103: note = a, c, g, inosine, u, deoxyadenosine, deoxyguanosine, deoxycytidine, deoxyinosine, thymine, ribonebularine, 2'-O-methylnebularine, or 2'-deoxynebularine

SEQ ID NO: 3092 - RNA, 103 nt, synthetic construct; identical to SEQ ID NO: 1797
  source 1..103: mol_type = other RNA
  modified_base 1: mod_base = OTHER; note = 2'-O-Methyl-cytidine phosphorothioate
  modified_base 2: mod_base = OTHER; note = 2'-O-Methyl-adenosine phosphorothioate
  modified_base 3: mod_base = OTHER; note = 2'-O-Methyl-guanosine
  modified_base 21: mod_base = OTHER; note = 2'-O-Methyl-guanosine
  modified_base 25: mod_base = OTHER; note = uridine phosphorothioate
  modified_base 28: mod_base = OTHER; note = 2'-O-Methyl-adenosine
  modified_base 29: mod_base = OTHER; note = 2'-O-Methyl-guanosine
  modified_base 30: mod_base = OTHER; note = 2'-O-Methyl-cytidine
  modified_base 31: mod_base = OTHER; note = 2'-O-Methyl-uridine
  modified_base 32: mod_base = OTHER; note = 2'-O-Methyl-adenosine
  modified_base 33: mod_base = OTHER; note = 2'-O-Methyl-guanosine
  modified_base 34: mod_base = OTHER; note = 2'-O-Methyl-adenosine
  modified_base 35: mod_base = OTHER; note = 2'-O-Methyl-adenosine
  modified_base 36: mod_base = OTHER; note = 2'-O-Methyl-adenosine
  modified_base 37: mod_base = OTHER; note = 2'-O-Methyl-uridine
  modified_base 38: mod_base = OTHER; note = 2'-O-Methyl-adenosine
  modified_base 39: mod_base = OTHER; note = 2'-O-Methyl-guanosine
  modified_base 40: mod_base = OTHER; note = 2'-O-Methyl-cytidine
  modified_base 41: mod_base = OTHER; note = 2'-O-Methyl-adenosine
  modified_base 42: mod_base = OTHER; note = 2'-O-Methyl-adenosine
  modified_base 46: mod_base = OTHER; note = 2'-O-Methyl-adenosine
  modified_base 48: mod_base = OTHER; note = 2'-O-Methyl-adenosine
  modified_base 50: mod_base = OTHER; note = 2'-O-Methyl-uridine
  modified_base 52: mod_base = OTHER; note = 2'-O-Methyl-adenosine
  modified_base 53: mod_base = OTHER; note = 2'-O-Methyl-guanosine
  modified_base 54: mod_base = OTHER; note = 2'-O-Methyl-guanosine
  modified_base 57: mod_base = OTHER; note = 2'-O-Methyl-adenosine
  modified_base 61: mod_base = OTHER; note = 2'-O-Methyl-cytidine
  modified_base 64: mod_base = OTHER; note = uridine phosphorothioate
  modified_base 66: mod_base = OTHER; note = 2'-O-Methyl-uridine
  modified_base 67: mod_base = OTHER; note = 2'-O-Methyl-cytidine
  modified_base 70: mod_base = OTHER; note = 2'-O-Methyl-cytidine
  modified_base 71: mod_base = OTHER; note = 2'-O-Methyl-uridine
  modified_base 72: mod_base = OTHER; note = 2'-O-Methyl-uridine
  modified_base 73: mod_base = OTHER; note = 2'-O-Methyl-guanosine
  modified_base 74: mod_base = OTHER; note = 2'-O-Methyl-adenosine
  modified_base 75: mod_base = OTHER; note = 2'-O-Methyl-adenosine
  modified_base 76: mod_base = OTHER; note = 2'-O-Methyl-adenosine
  modified_base 77: mod_base = OTHER; note = 2'-O-Methyl-adenosine
  modified_base 78: mod_base = OTHER; note = 2'-O-Methyl-adenosine
  modified_base 79: mod_base = OTHER; note = 2'-O-Methyl-guanosine
  modified_base 80: mod_base = OTHER; note = 2'-O-Methyl-uridine
  modified_base 82: mod_base = OTHER; note = 2'-O-Methyl-guanosine
  modified_base 83: mod_base = OTHER; note = 2'-O-Methyl-cytidine
  modified_base 84: mod_base = OTHER; note = 2'-O-Methyl-adenosine
  modified_base 85: mod_base = OTHER; note = 2'-O-Methyl-cytidine
  modified_base 86: mod_base = OTHER; note = 2'-O-Methyl-cytidine
  modified_base 87: mod_base = OTHER; note = 2'-O-Methyl-guanosine
  modified_base 89: mod_base = OTHER; note = 2'-O-Methyl-guanosine
  modified_base 92: mod_base = OTHER; note = 2'-O-Methyl-guanosine
  modified_base 93: mod_base = OTHER; note = 2'-O-Methyl-guanosine
  modified_base 94: mod_base = OTHER; note = 2'-O-Methyl-uridine
  modified_base 95: mod_base = OTHER; note = 2'-O-Methyl-guanosine
  modified_base 96: mod_base = OTHER; note = 2'-O-Methyl-cytidine
  modified_base 97: mod_base = OTHER; note = 2'-O-Methyl-uridine
  modified_base 98: mod_base = OTHER; note = 2'-O-Methyl-uridine phosphorothioate
  modified_base 99: mod_base = OTHER; note = 2'-O-Methyl-uridine phosphorothioate
  modified_base 100: mod_base = OTHER; note = 2'-O-Methyl-uridine
  misc_difference 101: note = a, c, g, inosine, u, deoxyadenosine, deoxyguanosine, deoxycytidine, deoxyinosine, thymine, ribonebularine, 2'-O-methylnebularine, or 2'-deoxynebularine
  misc_difference 102: note = a, c, g, inosine, u, deoxyadenosine, deoxyguanosine, deoxycytidine, deoxyinosine, thymine, ribonebularine, 2'-O-methylnebularine, or 2'-deoxynebularine
  misc_difference 103: note = a, c, g, inosine, u, deoxyadenosine, deoxyguanosine, deoxycytidine, deoxyinosine, thymine, ribonebularine, 2'-O-methylnebularine, or 2'-deoxynebularine

SEQ ID NO: 3093 - RNA, 103 nt, synthetic construct; identical to SEQ ID NO: 1797
  source 1..103: mol_type = other RNA
  modified_base 1: mod_base = OTHER; note = 2'-O-Methyl-cytidine phosphorothioate
  modified_base 2: mod_base = OTHER; note = 2'-O-Methyl-adenosine phosphorothioate
  modified_base 3: mod_base = OTHER; note = 2'-O-Methyl-guanosine
  modified_base 21: mod_base = OTHER; note = 2'-O-Methyl-guanosine
  modified_base 25: mod_base = OTHER; note = uridine phosphorothioate
  modified_base 28: mod_base = OTHER; note = 2'-O-Methyl-adenosine
  modified_base 29: mod_base = OTHER; note = 2'-O-Methyl-guanosine
  modified_base 30: mod_base = OTHER; note = 2'-O-Methyl-cytidine
  modified_base 31: mod_base = OTHER; note = 2'-O-Methyl-uridine
  modified_base 32: mod_base = OTHER; note = 2'-O-Methyl-adenosine
  modified_base 33: mod_base = OTHER; note = 2'-O-Methyl-guanosine
  modified_base 34: mod_base = OTHER; note = 2'-O-Methyl-adenosine
  modified_base 35: mod_base = OTHER; note = 2'-O-Methyl-adenosine
  modified_base 36: mod_base = OTHER; note = 2'-O-Methyl-adenosine
  modified_base 37: mod_base = OTHER; note = 2'-O-Methyl-uridine
  modified_base 38: mod_base = OTHER; note = 2'-O-Methyl-adenosine
  modified_base 39: mod_base = OTHER; note = 2'-O-Methyl-guanosine
  modified_base 40: mod_base = OTHER; note = 2'-O-Methyl-cytidine
  modified_base 41: mod_base = OTHER; note = 2'-O-Methyl-adenosine
  modified_base 42: mod_base = OTHER; note = 2'-O-Methyl-adenosine
  modified_base 46: mod_base = OTHER; note = 2'-O-Methyl-adenosine
  modified_base 48: mod_base = OTHER; note = 2'-O-Methyl-adenosine
  modified_base 50: mod_base = OTHER; note = 2'-O-Methyl-uridine
  modified_base 52: mod_base = OTHER; note = 2'-O-Methyl-adenosine
  modified_base 53: mod_base = OTHER; note = 2'-O-Methyl-guanosine
  modified_base 54: mod_base = OTHER; note = 2'-O-Methyl-guanosine
  modified_base 57: mod_base = OTHER; note = 2'-O-Methyl-adenosine
  modified_base 61: mod_base = OTHER; note = 2'-O-Methyl-cytidine
  modified_base 64: mod_base = OTHER; note = uridine phosphorothioate
  modified_base 66: mod_base = OTHER; note = 2'-O-Methyl-uridine
  modified_base 67: mod_base = OTHER; note = 2'-O-Methyl-cytidine
  modified_base 70: mod_base = OTHER; note = 2'-O-Methyl-cytidine
  modified_base 71: mod_base = OTHER; note = 2'-O-Methyl-uridine
  modified_base 72: mod_base = OTHER; note = 2'-O-Methyl-uridine
  modified_base 73: mod_base = OTHER; note = 2'-O-Methyl-guanosine
  modified_base 74: mod_base = OTHER; note = 2'-O-Methyl-adenosine
  modified_base 75: mod_base = OTHER; note = 2'-O-Methyl-adenosine
  modified_base 76: mod_base = OTHER; note = 2'-O-Methyl-adenosine
  modified_base 77: mod_base = OTHER; note = 2'-O-Methyl-adenosine
  modified_base 78: mod_base = OTHER; note = 2'-O-Methyl-adenosine
  modified_base 79: mod_base = OTHER; note = 2'-O-Methyl-guanosine
  modified_base 80: mod_base = OTHER; note = 2'-O-Methyl-uridine
  modified_base 82: mod_base = OTHER; note = 2'-O-Methyl-guanosine
  modified_base 83: mod_base = OTHER; note = 2'-O-Methyl-cytidine
  modified_base 84: mod_base = OTHER; note = 2'-O-Methyl-adenosine
  modified_base 85: mod_base = OTHER; note = 2'-O-Methyl-cytidine
  modified_base 86: mod_base = OTHER; note = 2'-O-Methyl-cytidine
  modified_base 87: mod_base = OTHER; note = 2'-O-Methyl-guanosine
  modified_base 89: mod_base = OTHER; note = 2'-O-Methyl-guanosine
  modified_base 91: mod_base = OTHER; note = 2'-O-Methyl-cytidine
  modified_base 92: mod_base = OTHER; note = 2'-O-Methyl-guanosine
  modified_base 93: mod_base = OTHER; note = 2'-O-Methyl-guanosine
  modified_base 94: mod_base = OTHER; note = 2'-O-Methyl-uridine
  modified_base 95: mod_base = OTHER; note = 2'-O-Methyl-guanosine
  modified_base 96: mod_base = OTHER; note = 2'-O-Methyl-cytidine
  modified_base 97: mod_base = OTHER; note = 2'-O-Methyl-uridine
  modified_base 98: mod_base = OTHER; note = 2'-O-Methyl-uridine phosphorothioate
  modified_base 99: mod_base = OTHER; note = 2'-O-Methyl-uridine phosphorothioate
  modified_base 100: mod_base = OTHER; note = 2'-O-Methyl-uridine
  misc_difference 101: note = a, c, g, inosine, u, deoxyadenosine, deoxyguanosine, deoxycytidine, deoxyinosine, thymine, ribonebularine, 2'-O-methylnebularine, or 2'-deoxynebularine
  misc_difference 102: note = a, c, g, inosine, u, deoxyadenosine, deoxyguanosine, deoxycytidine, deoxyinosine, thymine, ribonebularine, 2'-O-methylnebularine, or 2'-deoxynebularine
  misc_difference 103: note = a, c, g, inosine, u, deoxyadenosine, deoxyguanosine, deoxycytidine, deoxyinosine, thymine, ribonebularine, 2'-O-methylnebularine, or 2'-deoxynebularine

SEQ ID NO: 3094 - RNA, 103 nt, synthetic construct; identical to SEQ ID NO: 1797
  source 1..103: mol_type = other RNA
  modified_base 1: mod_base = OTHER; note = 2'-O-Methyl-cytidine phosphorothioate
  modified_base 2: mod_base = OTHER; note = 2'-O-Methyl-adenosine phosphorothioate
  modified_base 3: mod_base = OTHER; note = 2'-O-Methyl-guanosine
  modified_base 21: mod_base = OTHER; note = 2'-O-Methyl-guanosine
  modified_base 25: mod_base = OTHER; note = uridine phosphorothioate
  modified_base 28: mod_base = OTHER; note = 2'-O-Methyl-adenosine
  modified_base 29: mod_base = OTHER; note = 2'-O-Methyl-guanosine
  modified_base 30: mod_base = OTHER; note = 2'-O-Methyl-cytidine
  modified_base 31: mod_base = OTHER; note = 2'-O-Methyl-uridine
  modified_base 32: mod_base = OTHER; note = 2'-O-Methyl-adenosine
  modified_base 34: mod_base = OTHER; note = 2'-O-Methyl-adenosine
  modified_base 35: mod_base = OTHER; note = 2'-O-Methyl-adenosine
  modified_base 36: mod_base = OTHER; note = 2'-O-Methyl-adenosine
  modified_base 37: mod_base = OTHER; note = 2'-O-Methyl-uridine
  modified_base 38: mod_base = OTHER; note = 2'-O-Methyl-adenosine
  modified_base 39: mod_base = OTHER; note = 2'-O-Methyl-guanosine
  modified_base 40: mod_base = OTHER; note = 2'-O-Methyl-cytidine
  modified_base 41: mod_base = OTHER; note = 2'-O-Methyl-adenosine
  modified_base 42: mod_base = OTHER; note = 2'-O-Methyl-adenosine
  modified_base 46: mod_base = OTHER; note = 2'-O-Methyl-adenosine
  modified_base 48: mod_base = OTHER; note = 2'-O-Methyl-adenosine
  modified_base 50: mod_base = OTHER; note = 2'-O-Methyl-uridine
  modified_base 52: mod_base = OTHER; note = 2'-O-Methyl-adenosine
  modified_base 53: mod_base = OTHER; note = 2'-O-Methyl-guanosine
  modified_base 54: mod_base = OTHER; note = 2'-O-Methyl-guanosine
  modified_base 57: mod_base = OTHER; note = 2'-O-Methyl-adenosine
  modified_base 61: mod_base = OTHER; note = 2'-O-Methyl-cytidine
  modified_base 64: mod_base = OTHER; note = uridine phosphorothioate
  modified_base 66: mod_base = OTHER; note = 2'-O-Methyl-uridine
  modified_base 67: mod_base = OTHER; note = 2'-O-Methyl-cytidine
  modified_base 70: mod_base = OTHER; note = 2'-O-Methyl-cytidine
  modified_base 71: mod_base = OTHER; note = 2'-O-Methyl-uridine
  modified_base 72: mod_base = OTHER; note = 2'-O-Methyl-uridine
  modified_base 73: mod_base = OTHER; note = 2'-O-Methyl-guanosine
  modified_base 74: mod_base = OTHER; note = 2'-O-Methyl-adenosine
  modified_base 75: mod_base = OTHER; note = 2'-O-Methyl-adenosine
  modified_base 76: mod_base = OTHER; note = 2'-O-Methyl-adenosine
  modified_base 77: mod_base = OTHER; note = 2'-O-Methyl-adenosine
  modified_base 78: mod_base = OTHER; note = 2'-O-Methyl-adenosine
  modified_base 79: mod_base = OTHER; note = 2'-O-Methyl-guanosine
  modified_base 80: mod_base = OTHER; note = 2'-O-Methyl-uridine
  modified_base 82: mod_base = OTHER; note = 2'-O-Methyl-guanosine
  modified_base 83: mod_base = OTHER; note = 2'-O-Methyl-cytidine
  modified_base 84: mod_base = OTHER; note = 2'-O-Methyl-adenosine
  modified_base 85: mod_base = OTHER; note = 2'-O-Methyl-cytidine
  modified_base 86: mod_base = OTHER; note = 2'-O-Methyl-cytidine
  modified_base 87: mod_base = OTHER; note = 2'-O-Methyl-guanosine
  modified_base 89: mod_base = OTHER; note = 2'-O-Methyl-guanosine
  modified_base 92: mod_base = OTHER; note = 2'-O-Methyl-guanosine
  modified_base 93: mod_base = OTHER; note = 2'-O-Methyl-guanosine
  modified_base 94: mod_base = OTHER; note = 2'-O-Methyl-uridine
  modified_base 95: mod_base = OTHER; note = 2'-O-Methyl-guanosine
  modified_base 96: mod_base = OTHER; note = 2'-O-Methyl-cytidine
  modified_base 97: mod_base = OTHER; note = 2'-O-Methyl-uridine
  modified_base 98: mod_base = OTHER; note = 2'-O-Methyl-uridine phosphorothioate
  modified_base 99: mod_base = OTHER; note = 2'-O-Methyl-uridine phosphorothioate
  modified_base 100: mod_base = OTHER; note = 2'-O-Methyl-uridine
  misc_difference 101: note = a, c, g, inosine, u, deoxyadenosine, deoxyguanosine, deoxycytidine, deoxyinosine, thymine, ribonebularine, 2'-O-methylnebularine, or 2'-deoxynebularine
  misc_difference 102: note = a, c, g, inosine, u, deoxyadenosine, deoxyguanosine, deoxycytidine, deoxyinosine, thymine, ribonebularine, 2'-O-methylnebularine, or 2'-deoxynebularine
  misc_difference 103: note = a, c, g, inosine, u, deoxyadenosine, deoxyguanosine, deoxycytidine, deoxyinosine, thymine, ribonebularine, 2'-O-methylnebularine, or 2'-deoxynebularine

SEQ ID NO: 3095 - RNA, 103 nt, synthetic construct; identical to SEQ ID NO: 1797
  source 1..103: mol_type = other RNA
  modified_base 1: mod_base = OTHER; note = 2'-O-Methyl-cytidine phosphorothioate
  modified_base 2: mod_base = OTHER; note = 2'-O-Methyl-adenosine phosphorothioate
  modified_base 3: mod_base = OTHER; note = 2'-O-Methyl-guanosine
  modified_base 21: mod_base = OTHER; note = 2'-O-Methyl-guanosine
  modified_base 25: mod_base = OTHER; note = uridine phosphorothioate
  modified_base 28: mod_base = OTHER; note = 2'-O-Methyl-adenosine
  modified_base 29: mod_base = OTHER; note = 2'-O-Methyl-guanosine
  modified_base 30: mod_base = OTHER; note = 2'-O-Methyl-cytidine
  modified_base 31: mod_base = OTHER; note = 2'-O-Methyl-uridine
  modified_base 32: mod_base = OTHER; note = 2'-O-Methyl-adenosine
  modified_base 34: mod_base = OTHER; note = 2'-O-Methyl-adenosine
  modified_base 35: mod_base = OTHER; note = 2'-O-Methyl-adenosine
  modified_base 36: mod_base = OTHER; note = 2'-O-Methyl-adenosine
  modified_base 37: mod_base = OTHER; note = 2'-O-Methyl-uridine
  modified_base 38: mod_base = OTHER; note = 2'-O-Methyl-adenosine
  modified_base 39: mod_base = OTHER; note = 2'-O-Methyl-guanosine
  modified_base 40: mod_base = OTHER; note = 2'-O-Methyl-cytidine
  modified_base 41: mod_base = OTHER; note = 2'-O-Methyl-adenosine
  modified_base 42: mod_base = OTHER; note = 2'-O-Methyl-adenosine
  modified_base 46: mod_base = OTHER; note = 2'-O-Methyl-adenosine
  modified_base 48: mod_base = OTHER; note = 2'-O-Methyl-adenosine
  modified_base 50: mod_base = OTHER; note = 2'-O-Methyl-uridine
  modified_base 52: mod_base = OTHER; note = 2'-O-Methyl-adenosine
  modified_base 53: mod_base = OTHER; note = 2'-O-Methyl-guanosine
  modified_base 54: mod_base = OTHER; note = 2'-O-Methyl-guanosine
  modified_base 57: mod_base = OTHER; note = 2'-O-Methyl-adenosine
  modified_base 61: mod_base = OTHER; note = 2'-O-Methyl-cytidine
  modified_base 64: mod_base = OTHER; note = uridine phosphorothioate
  modified_base 66: mod_base = OTHER; note = 2'-O-Methyl-uridine
  modified_base 67: mod_base = OTHER; note = 2'-O-Methyl-cytidine
  modified_base 70: mod_base = OTHER; note = 2'-O-Methyl-cytidine
  modified_base 71: mod_base = OTHER; note = 2'-O-Methyl-uridine
  modified_base 72: mod_base = OTHER; note = 2'-O-Methyl-uridine
  modified_base 73: mod_base = OTHER; note = 2'-O-Methyl-guanosine
  modified_base 74: mod_base = OTHER; note = 2'-O-Methyl-adenosine
  modified_base 75: mod_base = OTHER; note = 2'-O-Methyl-adenosine
  modified_base 76: mod_base = OTHER; note = 2'-O-Methyl-adenosine
  modified_base 77: mod_base = OTHER; note = 2'-O-Methyl-adenosine
  modified_base 78: mod_base = OTHER; note = 2'-O-Methyl-adenosine
  modified_base 79: mod_base = OTHER; note = 2'-O-Methyl-guanosine
  modified_base 80: mod_base = OTHER; note = 2'-O-Methyl-uridine
  modified_base 82: mod_base = OTHER; note = 2'-O-Methyl-guanosine
  modified_base 83: mod_base = OTHER; note = 2'-O-Methyl-cytidine
  modified_base 84: mod_base = OTHER; note = 2'-O-Methyl-adenosine
  modified_base 85: mod_base = OTHER; note = 2'-O-Methyl-cytidine
  modified_base 86: mod_base = OTHER; note = 2'-O-Methyl-cytidine
  modified_base 87: mod_base = OTHER; note = 2'-O-Methyl-guanosine
  modified_base 89: mod_base = OTHER; note = 2'-O-Methyl-guanosine
  modified_base 91: mod_base = OTHER; note = 2'-O-Methyl-cytidine
  modified_base 92: mod_base = OTHER; note = 2'-O-Methyl-guanosine
  modified_base 93: mod_base = OTHER; note = 2'-O-Methyl-guanosine
  modified_base 94: mod_base = OTHER; note = 2'-O-Methyl-uridine
  modified_base 95: mod_base = OTHER; note = 2'-O-Methyl-guanosine
  modified_base 96: mod_base = OTHER; note = 2'-O-Methyl-cytidine
  modified_base 97: mod_base = OTHER; note = 2'-O-Methyl-uridine
  modified_base 98: mod_base = OTHER; note = 2'-O-Methyl-uridine phosphorothioate
  modified_base 99: mod_base = OTHER; note = 2'-O-Methyl-uridine phosphorothioate
  modified_base 100: mod_base = OTHER; note = 2'-O-Methyl-uridine
  misc_difference 101: note = a, c, g, inosine, u, deoxyadenosine, deoxyguanosine, deoxycytidine, deoxyinosine, thymine, ribonebularine, 2'-O-methylnebularine, or 2'-deoxynebularine
  misc_difference 102: note = a, c, g, inosine, u, deoxyadenosine, deoxyguanosine, deoxycytidine, deoxyinosine, thymine, ribonebularine, 2'-O-methylnebularine, or 2'-deoxynebularine
  misc_difference 103: note = a, c, g, inosine, u, deoxyadenosine, deoxyguanosine, deoxycytidine, deoxyinosine, thymine, ribonebularine, 2'-O-methylnebularine, or 2'-deoxynebularine

SEQ ID NO: 3096 - RNA, 103 nt, synthetic construct; identical to SEQ ID NO: 1797
  source 1..103: mol_type = other RNA
  modified_base 1: mod_base = OTHER; note = 2'-O-Methyl-cytidine phosphorothioate
  modified_base 2: mod_base = OTHER; note = 2'-O-Methyl-adenosine phosphorothioate
  modified_base 3: mod_base = OTHER; note = 2'-O-Methyl-guanosine
  modified_base 21: mod_base = OTHER; note = 2'-O-Methyl-guanosine
  modified_base 25: mod_base = OTHER; note = uridine phosphorothioate
  modified_base 28: mod_base = OTHER; note = 2'-O-Methyl-adenosine
  modified_base 29: mod_base = OTHER; note = 2'-O-Methyl-guanosine
  modified_base 30: mod_base = OTHER; note = 2'-O-Methyl-cytidine
  modified_base 31: mod_base = OTHER; note = 2'-O-Methyl-uridine
  modified_base 32: mod_base = OTHER; note = 2'-O-Methyl-adenosine
  modified_base 34: mod_base = OTHER; note = 2'-O-Methyl-adenosine
  modified_base 35: mod_base = OTHER; note = 2'-O-Methyl-adenosine
  modified_base 36: mod_base = OTHER; note = 2'-O-Methyl-adenosine
  modified_base 37: mod_base = OTHER; note = 2'-O-Methyl-uridine
  modified_base 38: mod_base = OTHER; note = 2'-O-Methyl-adenosine
  modified_base 39: mod_base = OTHER; note = 2'-O-Methyl-guanosine
  modified_base 40: mod_base = OTHER; note = 2'-O-Methyl-cytidine
  modified_base 41: mod_base = OTHER; note = 2'-O-Methyl-adenosine
  modified_base 42: mod_base = OTHER; note = 2'-O-Methyl-adenosine
  modified_base 46: mod_base = OTHER; note = 2'-O-Methyl-adenosine
  modified_base 48: mod_base = OTHER; note = 2'-O-Methyl-adenosine
  modified_base 50: mod_base = OTHER; note = 2'-O-Methyl-uridine
  modified_base 52: mod_base = OTHER; note = 2'-O-Methyl-adenosine
  modified_base 53: mod_base = OTHER; note = 2'-O-Methyl-guanosine
  modified_base 54: mod_base = OTHER; note = 2'-O-Methyl-guanosine
  modified_base 55: mod_base = OTHER; note = 2'-O-Methyl-cytidine
  modified_base 56: mod_base = OTHER; note = 2'-O-Methyl-uridine
  modified_base 57: mod_base = OTHER; note = 2'-O-Methyl-adenosine
  modified_base 60: mod_base = OTHER; note = 2'-O-Methyl-cytidine
  modified_base 61: mod_base = OTHER; note = 2'-O-Methyl-cytidine
  modified_base 64: mod_base = OTHER; note = uridine phosphorothioate
  modified_base 66: mod_base = OTHER; note = 2'-O-Methyl-uridine
  modified_base 67: mod_base = OTHER; note = 2'-O-Methyl-cytidine
  modified_base 70: mod_base = OTHER; note = 2'-O-Methyl-cytidine
  modified_base 71: mod_base = OTHER; note = 2'-O-Methyl-uridine
  modified_base 72: mod_base = OTHER; note = 2'-O-Methyl-uridine
  modified_base 74: mod_base = OTHER; note = 2'-O-Methyl-adenosine
  modified_base 75: mod_base = OTHER; note = 2'-O-Methyl-adenosine
  modified_base 76: mod_base = OTHER; note = 2'-O-Methyl-adenosine
  modified_base 77: mod_base = OTHER; note = 2'-O-Methyl-adenosine
  modified_base 78: mod_base = OTHER; note = 2'-O-Methyl-adenosine
  modified_base 79: mod_base = OTHER; note = 2'-O-Methyl-guanosine
  modified_base 80: mod_base = OTHER; note = 2'-O-Methyl-uridine
  modified_base 82: mod_base = OTHER; note = 2'-O-Methyl-guanosine
  modified_base 83: mod_base = OTHER; note = 2'-O-Methyl-cytidine
  modified_base 84: mod_base = OTHER; note = 2'-O-Methyl-adenosine
  modified_base 85: mod_base = OTHER; note = 2'-O-Methyl-cytidine
  modified_base 86: mod_base = OTHER; note = 2'-O-Methyl-cytidine
  modified_base 87: mod_base = OTHER; note = 2'-O-Methyl-guanosine
  modified_base 89: mod_base = OTHER; note = 2'-O-Methyl-guanosine
  modified_base 92: mod_base = OTHER; note = 2'-O-Methyl-guanosine
  modified_base 93: mod_base = OTHER; note = 2'-O-Methyl-guanosine
  modified_base 94: mod_base = OTHER; note = 2'-O-Methyl-uridine
  modified_base 95: mod_base = OTHER; note = 2'-O-Methyl-guanosine
  modified_base 96: mod_base = OTHER; note = 2'-O-Methyl-cytidine
  modified_base 97: mod_base = OTHER; note = 2'-O-Methyl-uridine
  modified_base 98: mod_base = OTHER; note = 2'-O-Methyl-uridine phosphorothioate
  modified_base 99: mod_base = OTHER; note = 2'-O-Methyl-uridine phosphorothioate
  modified_base 100: mod_base = OTHER; note = 2'-O-Methyl-uridine
  misc_difference 101: note = a, c, g, inosine, u, deoxyadenosine, deoxyguanosine, deoxycytidine, deoxyinosine, thymine, ribonebularine, 2'-O-methylnebularine, or 2'-deoxynebularine
  misc_difference 102: note = a, c, g, inosine, u, deoxyadenosine, deoxyguanosine, deoxycytidine, deoxyinosine, thymine, ribonebularine, 2'-O-methylnebularine, or 2'-deoxynebularine
  misc_difference 103: note = a, c, g, inosine, u, deoxyadenosine, deoxyguanosine, deoxycytidine, deoxyinosine, thymine, ribonebularine, 2'-O-methylnebularine, or 2'-deoxynebularine

SEQ ID NO: 3097 - RNA, 103 nt, synthetic construct; identical to SEQ ID NO: 1795
  source 1..103: mol_type = other RNA
  modified_base 1: mod_base = OTHER; note = 2'-O-Methyl-cytidine phosphorothioate
  modified_base 2: mod_base = OTHER; note = 2'-O-Methyl-cytidine phosphorothioate
  modified_base 3: mod_base = OTHER; note = 2'-O-Methyl-cytidine
  modified_base 21: mod_base = OTHER; note = 2'-O-Methyl-guanosine
  modified_base 25: mod_base = OTHER; note = uridine phosphorothioate
  modified_base 28: mod_base = OTHER; note = 2'-O-Methyl-adenosine
  modified_base 29: mod_base = OTHER; note = 2'-O-Methyl-guanosine
  modified_base 30: mod_base = OTHER; note = 2'-O-Methyl-cytidine
  modified_base 31: mod_base = OTHER; note = 2'-O-Methyl-uridine
  modified_base 32: mod_base = OTHER; note = 2'-O-Methyl-adenosine
  modified_base 33: mod_base = OTHER; note = 2'-O-Methyl-guanosine
  modified_base 34: mod_base = OTHER; note = 2'-O-Methyl-adenosine
  modified_base 35: mod_base = OTHER; note = 2'-O-Methyl-adenosine
  modified_base 36: mod_base = OTHER; note = 2'-O-Methyl-adenosine
  modified_base 37: mod_base = OTHER; note = 2'-O-Methyl-uridine
  modified_base 38: mod_base = OTHER; note = 2'-O-Methyl-adenosine
  modified_base 39: mod_base = OTHER; note = 2'-O-Methyl-guanosine
  modified_base 40: mod_base = OTHER; note = 2'-O-Methyl-cytidine
  modified_base 41: mod_base = OTHER; note = 2'-O-Methyl-adenosine
  modified_base 42: mod_base = OTHER; note = 2'-O-Methyl-adenosine
  modified_base 45: mod_base = OTHER; note = uridine phosphorothioate
  modified_base 46: mod_base = OTHER; note = 2'-O-Methyl-adenosine
  modified_base 48: mod_base = OTHER; note = 2'-O-Methyl-adenosine
  modified_base 50: mod_base = OTHER; note = 2'-O-Methyl-uridine
  modified_base 52: mod_base = OTHER; note = 2'-O-Methyl-adenosine
  modified_base 53: mod_base = OTHER; note = 2'-O-Methyl-guanosine
  modified_base 54: mod_base = OTHER; note = 2'-O-Methyl-guanosine
  modified_base 55: mod_base = OTHER; note = 2'-O-Methyl-cytidine
  modified_base 56: mod_base = OTHER; note = 2'-O-Methyl-uridine
  modified_base 57: mod_base = OTHER; note = 2'-O-Methyl-adenosine
  modified_base 60: mod_base = OTHER; note = 2'-O-Methyl-cytidine
  modified_base 61: mod_base = OTHER; note = 2'-O-Methyl-cytidine
  modified_base 64: mod_base = OTHER; note = uridine phosphorothioate
  modified_base 66: mod_base = OTHER; note = 2'-O-Methyl-uridine
  modified_base 67: mod_base = OTHER; note = 2'-O-Methyl-cytidine
  modified_base 70: mod_base = OTHER; note = 2'-O-Methyl-cytidine
  modified_base 71: mod_base = OTHER; note = 2'-O-Methyl-uridine
  modified_base 72: mod_base = OTHER; note = 2'-O-Methyl-uridine
  modified_base 73: mod_base = OTHER; note = 2'-O-Methyl-guanosine
  modified_base 74: mod_base = OTHER; note = 2'-O-Methyl-adenosine
  modified_base 75: mod_base = OTHER; note = 2'-O-Methyl-adenosine
  modified_base 76: mod_base = OTHER; note = 2'-O-Methyl-adenosine
  modified_base 77: mod_base = OTHER; note = 2'-O-Methyl-adenosine
  modified_base 78: mod_base = OTHER; note = 2'-O-Methyl-adenosine
  modified_base 79: mod_base = OTHER; note = 2'-O-Methyl-guanosine
  modified_base 80: mod_base = OTHER; note = 2'-O-Methyl-uridine
  modified_base 81: mod_base = OTHER; note = 2'-O-Methyl-guanosine
  modified_base 83: mod_base = OTHER; note = 2'-O-Methyl-cytidine
  modified_base 84: mod_base = OTHER; note = 2'-O-Methyl-adenosine
  modified_base 85: mod_base = OTHER; note = 2'-O-Methyl-cytidine
  modified_base 86: mod_base = OTHER; note = 2'-O-Methyl-cytidine
  modified_base 87: mod_base = OTHER; note = 2'-O-Methyl-guanosine
  modified_base 88: mod_base = OTHER; note = 2'-O-Methyl-adenosine
  modified_base 89: mod_base = OTHER; note = 2'-O-Methyl-guanosine
  modified_base 90: mod_base = OTHER; note = 2'-O-Methyl-uridine
  modified_base 91: mod_base = OTHER; note = 2'-O-Methyl-cytidine
  modified_base 92: mod_base = OTHER; note = 2'-O-Methyl-guanosine
  modified_base 93: mod_base = OTHER; note = 2'-O-Methyl-guanosine
  modified_base 94: mod_base = OTHER; note = 2'-O-Methyl-uridine
  modified_base 95: mod_base = OTHER; note = 2'-O-Methyl-guanosine
  modified_base 96: mod_base = OTHER; note = 2'-O-Methyl-cytidine
  modified_base 97: mod_base = OTHER; note = 2'-O-Methyl-uridine
  modified_base 98: mod_base = OTHER; note = 2'-O-Methyl-uridine phosphorothioate
  modified_base 99: mod_base = OTHER; note = 2'-O-Methyl-uridine phosphorothioate
  modified_base 100: mod_base = OTHER; note = 2'-O-Methyl-uridine
  misc_difference 101: note = a, c, g, inosine, u, deoxyadenosine, deoxyguanosine, deoxycytidine, deoxyinosine, thymine, ribonebularine, 2'-O-methylnebularine, or 2'-deoxynebularine
  misc_difference 102: note = a, c, g, inosine, u, deoxyadenosine, deoxyguanosine, deoxycytidine, deoxyinosine, thymine, ribonebularine, 2'-O-methylnebularine, or 2'-deoxynebularine
  misc_difference 103: note = a, c, g, inosine, u, deoxyadenosine, deoxyguanosine, deoxycytidine, deoxyinosine, thymine, ribonebularine, 2'-O-methylnebularine, or 2'-deoxynebularine

SEQ ID NO: 3098 - RNA, 103 nt, synthetic construct; identical to SEQ ID NO: 1795
  source 1..103: mol_type = other RNA
  modified_base 1: mod_base = OTHER; note = 2'-O-Methyl-cytidine phosphorothioate
  modified_base 2: mod_base = OTHER; note = 2'-O-Methyl-cytidine phosphorothioate
  modified_base 3: mod_base = OTHER; note = 2'-O-Methyl-cytidine
  modified_base 21: mod_base = OTHER; note = 2'-O-Methyl-guanosine
  modified_base 25: mod_base = OTHER; note = uridine phosphorothioate
  modified_base 28: mod_base = OTHER; note = 2'-O-Methyl-adenosine
  modified_base 29: mod_base = OTHER; note = 2'-O-Methyl-guanosine
  modified_base 30: mod_base = OTHER; note = 2'-O-Methyl-cytidine
  modified_base 31: mod_base = OTHER; note = 2'-O-Methyl-uridine
  modified_base 32: mod_base = OTHER; note = 2'-O-Methyl-adenosine
  modified_base 34: mod_base = OTHER; note = 2'-O-Methyl-adenosine
  modified_base 35: mod_base = OTHER; note = 2'-O-Methyl-adenosine
  modified_base 36: mod_base = OTHER; note = 2'-O-Methyl-adenosine
  modified_base 37: mod_base = OTHER; note = 2'-O-Methyl-uridine
  modified_base 38: mod_base = OTHER; note = 2'-O-Methyl-adenosine
  modified_base 39: mod_base = OTHER; note = 2'-O-Methyl-guanosine
  modified_base 40: mod_base = OTHER; note = 2'-O-Methyl-cytidine
  modified_base 41: mod_base = OTHER; note = 2'-O-Methyl-adenosine
  modified_base 42: mod_base = OTHER; note = 2'-O-Methyl-adenosine
  modified_base 45: mod_base = OTHER; note = uridine phosphorothioate
  modified_base 46: mod_base = OTHER; note = 2'-O-Methyl-adenosine
  modified_base 48: mod_base = OTHER; note = 2'-O-Methyl-adenosine
  modified_base 50: mod_base = OTHER; note = 2'-O-Methyl-uridine
  modified_base 52: mod_base = OTHER; note = 2'-O-Methyl-adenosine
  modified_base 53: mod_base = OTHER; note = 2'-O-Methyl-guanosine
  modified_base 54: mod_base = OTHER; note = 2'-O-Methyl-guanosine
  modified_base 55: mod_base = OTHER; note = 2'-O-Methyl-cytidine
  modified_base 56: mod_base = OTHER; note = 2'-O-Methyl-uridine
  modified_base 57: mod_base = OTHER; note = 2'-O-Methyl-adenosine
  modified_base 60: mod_base = OTHER; note = 2'-O-Methyl-cytidine
  modified_base 61: mod_base = OTHER; note = 2'-O-Methyl-cytidine
  modified_base 64: mod_base = OTHER; note = uridine phosphorothioate
  modified_base 66: mod_base = OTHER; note = 2'-O-Methyl-uridine
  modified_base 67: mod_base = OTHER; note = 2'-O-Methyl-cytidine
  modified_base 70: mod_base = OTHER; note = 2'-O-Methyl-cytidine
  modified_base 71: mod_base = OTHER; note = 2'-O-Methyl-uridine
  modified_base 72: mod_base = OTHER; note = 2'-O-Methyl-uridine
  modified_base 74: mod_base = OTHER; note = 2'-O-Methyl-adenosine
  modified_base 75: mod_base = OTHER; note = 2'-O-Methyl-adenosine
  modified_base 76: mod_base = OTHER; note = 2'-O-Methyl-adenosine
  modified_base 77: mod_base = OTHER; note = 2'-O-Methyl-adenosine
  modified_base 78: mod_base = OTHER; note = 2'-O-Methyl-adenosine
  modified_base 79: mod_base = OTHER; note = 2'-O-Methyl-guanosine
  modified_base 80: mod_base = OTHER; note = 2'-O-Methyl-uridine
  modified_base 81: mod_base = OTHER; note = 2'-O-Methyl-guanosine
  modified_base 83: mod_base = OTHER; note = 2'-O-Methyl-cytidine
  modified_base 84: mod_base = OTHER; note = 2'-O-Methyl-adenosine
  modified_base 85: mod_base = OTHER; note = 2'-O-Methyl-cytidine
  modified_base 86: mod_base = OTHER; note = 2'-O-Methyl-cytidine
  modified_base 87: mod_base = OTHER; note = 2'-O-Methyl-guanosine
  modified_base 88: mod_base = OTHER; note = 2'-O-Methyl-adenosine
  modified_base 89: mod_base = OTHER; note = 2'-O-Methyl-guanosine
  modified_base 90: mod_base = OTHER; note = 2'-O-Methyl-uridine
  modified_base 91: mod_base = OTHER; note = 2'-O-Methyl-cytidine
  modified_base 92: mod_base = OTHER; note = 2'-O-Methyl-guanosine
  modified_base 93: mod_base = OTHER; note = 2'-O-Methyl-guanosine
  modified_base 94: mod_base = OTHER; note = 2'-O-Methyl-uridine
  modified_base 95: mod_base = OTHER; note = 2'-O-Methyl-guanosine
  modified_base 96: mod_base = OTHER; note = 2'-O-Methyl-cytidine
  modified_base 97: mod_base = OTHER; note = 2'-O-Methyl-uridine
  modified_base 98: mod_base = OTHER; note = 2'-O-Methyl-uridine phosphorothioate
  modified_base 99: mod_base = OTHER; note = 2'-O-Methyl-uridine phosphorothioate
  modified_base 100: mod_base = OTHER; note = 2'-O-Methyl-uridine
  misc_difference 101: note = a, c, g, inosine, u, deoxyadenosine, deoxyguanosine, deoxycytidine, deoxyinosine, thymine, ribonebularine, 2'-O-methylnebularine, or 2'-deoxynebularine
  misc_difference 102: note = a, c, g, inosine, u, deoxyadenosine, deoxyguanosine, deoxycytidine, deoxyinosine, thymine, ribonebularine, 2'-O-methylnebularine, or 2'-deoxynebularine
  misc_difference 103: note = a, c, g, inosine, u, deoxyadenosine, deoxyguanosine, deoxycytidine, deoxyinosine, thymine, ribonebularine, 2'-O-methylnebularine, or 2'-deoxynebularine

SEQ ID NO: 3099 - RNA, 103 nt, synthetic construct; identical to SEQ ID NO: 1796
  source 1..103: mol_type = other RNA
  modified_base 1: mod_base = OTHER; note = 2'-O-Methyl-guanosine phosphorothioate
  modified_base 2: mod_base = OTHER; note = 2'-O-Methyl-adenosine phosphorothioate
  modified_base 3: mod_base = OTHER; note = 2'-O-Methyl-guanosine
  modified_base 21: mod_base = OTHER; note = 2'-O-Methyl-guanosine
  modified_base 25: mod_base = OTHER; note = uridine phosphorothioate
  modified_base 28: mod_base = OTHER; note = 2'-O-Methyl-adenosine
  modified_base 29: mod_base = OTHER; note = 2'-O-Methyl-guanosine
  modified_base 30: mod_base = OTHER; note = 2'-O-Methyl-cytidine
  modified_base 31: mod_base = OTHER; note = 2'-O-Methyl-uridine
  modified_base 32: mod_base = OTHER; note = 2'-O-Methyl-adenosine
  modified_base 33: mod_base = OTHER; note = 2'-O-Methyl-guanosine
  modified_base 34: mod_base = OTHER; note = 2'-O-Methyl-adenosine
  modified_base 35: mod_base = OTHER; note = 2'-O-Methyl-adenosine
  modified_base 36: mod_base = OTHER; note = 2'-O-Methyl-adenosine
  modified_base 37: mod_base = OTHER; note = 2'-O-Methyl-uridine
  modified_base 38: mod_base = OTHER; note = 2'-O-Methyl-adenosine
  modified_base 39: mod_base = OTHER; note = 2'-O-Methyl-guanosine
  modified_base 40: mod_base = OTHER; note = 2'-O-Methyl-cytidine
  modified_base 41: mod_base = OTHER; note = 2'-O-Methyl-adenosine
  modified_base 42: mod_base = OTHER; note = 2'-O-Methyl-adenosine
  modified_base 45: mod_base = OTHER; note = uridine phosphorothioate
  modified_base 46: mod_base = OTHER; note = 2'-O-Methyl-adenosine
  modified_base 48: mod_base = OTHER; note = 2'-O-Methyl-adenosine
  modified_base 50: mod_base = OTHER; note = 2'-O-Methyl-uridine
  modified_base 52: mod_base = OTHER; note = 2'-O-Methyl-adenosine
  modified_base 53: mod_base = OTHER; note = 2'-O-Methyl-guanosine
  modified_base 54: mod_base = OTHER; note = 2'-O-Methyl-guanosine
  modified_base 55: mod_base = OTHER; note = 2'-O-Methyl-cytidine
  modified_base 56: mod_base = OTHER; note = 2'-O-Methyl-uridine
  modified_base 57: mod_base = OTHER; note = 2'-O-Methyl-adenosine
  modified_base 60: mod_base = OTHER; note = 2'-O-Methyl-cytidine
  modified_base 61: mod_base = OTHER; note = 2'-O-Methyl-cytidine
  modified_base 64: mod_base = OTHER; note = uridine phosphorothioate
  modified_base 66: mod_base = OTHER; note = 2'-O-Methyl-uridine
  modified_base 67: mod_base = OTHER; note = 2'-O-Methyl-cytidine
  modified_base 70: mod_base = OTHER; note = 2'-O-Methyl-cytidine
  modified_base 71: mod_base = OTHER; note = 2'-O-Methyl-uridine
  modified_base 72: mod_base = OTHER; note = 2'-O-Methyl-uridine
  modified_base 73: mod_base = OTHER; note = 2'-O-Methyl-guanosine
  modified_base 74: mod_base = OTHER; note = 2'-O-Methyl-adenosine
  modified_base 75: mod_base = OTHER; note = 2'-O-Methyl-adenosine
  modified_base 76: mod_base = OTHER; note = 2'-O-Methyl-adenosine
  modified_base 77: mod_base = OTHER; note = 2'-O-Methyl-adenosine
  modified_base 78: mod_base = OTHER; note = 2'-O-Methyl-adenosine
  modified_base 79: mod_base = OTHER; note = 2'-O-Methyl-guanosine
  modified_base 80: mod_base = OTHER; note = 2'-O-Methyl-uridine
  modified_base 81: mod_base = OTHER; note = 2'-O-Methyl-guanosine
  modified_base 83: mod_base = OTHER; note = 2'-O-Methyl-cytidine
  modified_base 84: mod_base = OTHER; note = 2'-O-Methyl-adenosine
  modified_base 85: mod_base = OTHER; note = 2'-O-Methyl-cytidine
  modified_base 86: mod_base = OTHER; note = 2'-O-Methyl-cytidine
  modified_base 87: mod_base = OTHER; note = 2'-O-Methyl-guanosine
  modified_base 88: mod_base = OTHER; note = 2'-O-Methyl-adenosine
  modified_base 89: mod_base = OTHER; note = 2'-O-Methyl-guanosine
  modified_base 90: mod_base = OTHER; note = 2'-O-Methyl-uridine
  modified_base 91: mod_base = OTHER; note = 2'-O-Methyl-cytidine
  modified_base 92: mod_base = OTHER; note = 2'-O-Methyl-guanosine
  modified_base 93: mod_base = OTHER; note = 2'-O-Methyl-guanosine
  modified_base 94: mod_base = OTHER; note = 2'-O-Methyl-uridine
  modified_base 95: mod_base = OTHER; note = 2'-O-Methyl-guanosine
  modified_base 96: mod_base = OTHER; note = 2'-O-Methyl-cytidine
  modified_base 97: mod_base = OTHER; note = 2'-O-Methyl-uridine
  modified_base 98: mod_base = OTHER; note = 2'-O-Methyl-uridine phosphorothioate
  modified_base 99: mod_base = OTHER; note = 2'-O-Methyl-uridine phosphorothioate
  modified_base 100: mod_base = OTHER; note = 2'-O-Methyl-uridine
  misc_difference 101: note = a, c, g, inosine, u, deoxyadenosine, deoxyguanosine, deoxycytidine, deoxyinosine, thymine, ribonebularine, 2'-O-methylnebularine, or 2'-deoxynebularine
  misc_difference 102: note = a, c, g, inosine, u, deoxyadenosine, deoxyguanosine, deoxycytidine, deoxyinosine, thymine, ribonebularine, 2'-O-methylnebularine, or 2'-deoxynebularine
  misc_difference 103: note = a, c, g, inosine, u, deoxyadenosine, deoxyguanosine, deoxycytidine, deoxyinosine, thymine, ribonebularine, 2'-O-methylnebularine, or 2'-deoxynebularine

SEQ ID NO: 3100 - RNA, 103 nt, synthetic construct; identical to SEQ ID NO: 1796
  source 1..103: mol_type = other RNA
  modified_base 1: mod_base = OTHER; note = 2'-O-Methyl-guanosine phosphorothioate
  modified_base 2: mod_base = OTHER; note = 2'-O-Methyl-adenosine phosphorothioate
  modified_base 3: mod_base = OTHER; note = 2'-O-Methyl-guanosine
  modified_base 21: mod_base = OTHER; note = 2'-O-Methyl-guanosine
  modified_base 25: mod_base = OTHER; note = uridine phosphorothioate
  modified_base 28: mod_base = OTHER; note = 2'-O-Methyl-adenosine
  modified_base 29: mod_base = OTHER; note = 2'-O-Methyl-guanosine
  modified_base 30: mod_base = OTHER; note = 2'-O-Methyl-cytidine
  modified_base 31: mod_base = OTHER; note = 2'-O-Methyl-uridine
  modified_base 32: mod_base = OTHER; note = 2'-O-Methyl-adenosine
  modified_base 34: mod_base = OTHER; note = 2'-O-Methyl-adenosine
  modified_base 35: mod_base = OTHER; note = 2'-O-Methyl-adenosine
  modified_base 36: mod_base = OTHER; note = 2'-O-Methyl-adenosine
  modified_base 37: mod_base = OTHER; note = 2'-O-Methyl-uridine
  modified_base 38: mod_base = OTHER; note = 2'-O-Methyl-adenosine
  modified_base 39: mod_base = OTHER; note = 2'-O-Methyl-guanosine
  modified_base 40: mod_base = OTHER; note = 2'-O-Methyl-cytidine
  modified_base 41: mod_base = OTHER; note = 2'-O-Methyl-adenosine
  modified_base 42: mod_base = OTHER; note = 2'-O-Methyl-adenosine
  modified_base 45: mod_base = OTHER; note = uridine phosphorothioate
  modified_base 46: mod_base = OTHER; note = 2'-O-Methyl-adenosine
  modified_base 48: mod_base = OTHER; note = 2'-O-Methyl-adenosine
  modified_base 50: mod_base = OTHER; note = 2'-O-Methyl-uridine
  modified_base 52: mod_base = OTHER; note = 2'-O-Methyl-adenosine
  modified_base 53: mod_base = OTHER; note = 2'-O-Methyl-guanosine
  modified_base 54: mod_base = OTHER; note = 2'-O-Methyl-guanosine
  modified_base 55: mod_base = OTHER; note = 2'-O-Methyl-cytidine
  modified_base 56: mod_base = OTHER; note = 2'-O-Methyl-uridine
  modified_base 57: mod_base = OTHER; note = 2'-O-Methyl-adenosine
  modified_base 60: mod_base = OTHER; note = 2'-O-Methyl-cytidine
  modified_base 61: mod_base = OTHER; note = 2'-O-Methyl-cytidine
  modified_base 64: mod_base = OTHER; note = uridine phosphorothioate
  modified_base 66: mod_base = OTHER; note = 2'-O-Methyl-uridine
  modified_base 67: mod_base = OTHER; note = 2'-O-Methyl-cytidine
  modified_base 70: mod_base = OTHER; note = 2'-O-Methyl-cytidine
  modified_base 71: mod_base = OTHER; note = 2'-O-Methyl-uridine
  modified_base 72: mod_base = OTHER; note = 2'-O-Methyl-uridine
  modified_base 74: mod_base = OTHER; note = 2'-O-Methyl-adenosine
  modified_base 75: mod_base = OTHER; note = 2'-O-Methyl-adenosine
  modified_base 76: mod_base = OTHER; note = 2'-O-Methyl-adenosine
  modified_base 77: mod_base = OTHER; note = 2'-O-Methyl-adenosine
  modified_base 78: mod_base = OTHER; note = 2'-O-Methyl-adenosine
  modified_base 79: mod_base = OTHER; note = 2'-O-Methyl-guanosine
  modified_base 80: mod_base = OTHER; note = 2'-O-Methyl-uridine
  modified_base 81: mod_base = OTHER; note = 2'-O-Methyl-guanosine
  modified_base 83: mod_base = OTHER; note = 2'-O-Methyl-cytidine
  modified_base 84: mod_base = OTHER; note = 2'-O-Methyl-adenosine
  modified_base 85: mod_base = OTHER; note = 2'-O-Methyl-cytidine
  modified_base 86: mod_base = OTHER; note = 2'-O-Methyl-cytidine
  modified_base 87: mod_base = OTHER; note = 2'-O-Methyl-guanosine
  modified_base 88: mod_base = OTHER; note = 2'-O-Methyl-adenosine
  modified_base 89: mod_base = OTHER; note = 2'-O-Methyl-guanosine
  modified_base 90: mod_base = OTHER; note = 2'-O-Methyl-uridine
  modified_base 91: mod_base = OTHER; note = 2'-O-Methyl-cytidine
  modified_base 92: mod_base = OTHER; note = 2'-O-Methyl-guanosine
  modified_base 93: mod_base = OTHER; note = 2'-O-Methyl-guanosine
  modified_base 94: mod_base = OTHER; note = 2'-O-Methyl-uridine
  modified_base 95: mod_base = OTHER; note = 2'-O-Methyl-guanosine
  modified_base 96: mod_base = OTHER; note = 2'-O-Methyl-cytidine
  modified_base 97: mod_base = OTHER; note = 2'-O-Methyl-uridine
  modified_base 98: mod_base = OTHER; note = 2'-O-Methyl-uridine phosphorothioate
  modified_base 99: mod_base = OTHER; note = 2'-O-Methyl-uridine phosphorothioate
  modified_base 100: mod_base = OTHER; note = 2'-O-Methyl-uridine
  misc_difference 101: note = a, c, g, inosine, u, deoxyadenosine, deoxyguanosine, deoxycytidine, deoxyinosine, thymine, ribonebularine, 2'-O-methylnebularine, or 2'-deoxynebularine
  misc_difference 102: note = a, c, g, inosine, u, deoxyadenosine, deoxyguanosine, deoxycytidine, deoxyinosine, thymine, ribonebularine, 2'-O-methylnebularine, or 2'-deoxynebularine
  misc_difference 103: note = a, c, g, inosine, u, deoxyadenosine, deoxyguanosine, deoxycytidine, deoxyinosine, thymine, ribonebularine, 2'-O-methylnebularine, or 2'-deoxynebularine

SEQ ID NO: 3101 - RNA, 103 nt, synthetic construct; identical to SEQ ID NO: 1797
  source 1..103: mol_type = other RNA
  modified_base 1: mod_base = OTHER; note = 2'-O-Methyl-cytidine phosphorothioate
  modified_base 2: mod_base = OTHER; note = 2'-O-Methyl-adenosine phosphorothioate
  modified_base 3: mod_base = OTHER; note = 2'-O-Methyl-guanosine
  modified_base 21: mod_base = OTHER; note = 2'-O-Methyl-guanosine
  modified_base 25: mod_base = OTHER; note = uridine phosphorothioate
  modified_base 28: mod_base = OTHER; note = 2'-O-Methyl-adenosine
  modified_base 29: mod_base = OTHER; note = 2'-O-Methyl-guanosine
  modified_base 30: mod_base = OTHER; note = 2'-O-Methyl-cytidine
  modified_base 31: mod_base = OTHER; note = 2'-O-Methyl-uridine
  modified_base 32: mod_base = OTHER; note = 2'-O-Methyl-adenosine
  modified_base 33: mod_base = OTHER; note = 2'-O-Methyl-guanosine
  modified_base 34: mod_base = OTHER; note = 2'-O-Methyl-adenosine
  modified_base 35: mod_base = OTHER; note = 2'-O-Methyl-adenosine
  modified_base 36: mod_base = OTHER; note = 2'-O-Methyl-adenosine
  modified_base 37: mod_base = OTHER; note = 2'-O-Methyl-uridine
  modified_base 38: mod_base = OTHER; note = 2'-O-Methyl-adenosine
  modified_base 39: mod_base = OTHER; note = 2'-O-Methyl-guanosine
  modified_base 40: mod_base = OTHER; note = 2'-O-Methyl-cytidine
  modified_base 41: mod_base = OTHER; note = 2'-O-Methyl-adenosine
  modified_base 42: mod_base = OTHER; note = 2'-O-Methyl-adenosine
  modified_base 45: mod_base = OTHER; note = uridine phosphorothioate
  modified_base 46: mod_base = OTHER; note = 2'-O-Methyl-adenosine
  modified_base 48: mod_base = OTHER; note = 2'-O-Methyl-adenosine
  modified_base 50: mod_base = OTHER; note = 2'-O-Methyl-uridine
  modified_base 52: mod_base = OTHER; note = 2'-O-Methyl-adenosine
  modified_base 53: mod_base = OTHER; note = 2'-O-Methyl-guanosine
  modified_base 54: mod_base = OTHER; note = 2'-O-Methyl-guanosine
  modified_base 57: mod_base = OTHER; note = 2'-O-Methyl-adenosine
  modified_base 61: mod_base = OTHER; note = 2'-O-Methyl-cytidine
  modified_base 64: mod_base = OTHER; note = uridine phosphorothioate
  modified_base 66: mod_base = OTHER; note = 2'-O-Methyl-uridine
  modified_base 67: mod_base = OTHER; note = 2'-O-Methyl-cytidine
  modified_base 70: mod_base = OTHER; note = 2'-O-Methyl-cytidine
  modified_base 71: mod_base = OTHER; note = 2'-O-Methyl-uridine
  modified_base 72: mod_base = OTHER; note = 2'-O-Methyl-uridine
  modified_base 74: mod_base = OTHER; note = 2'-O-Methyl-adenosine
  modified_base 75: mod_base = OTHER; note = 2'-O-Methyl-adenosine
  modified_base 76: mod_base = OTHER; note = 2'-O-Methyl-adenosine
  modified_base 77: mod_base = OTHER; note = 2'-O-Methyl-adenosine
  modified_base 78: mod_base = OTHER; note = 2'-O-Methyl-adenosine
  modified_base 79: mod_base = OTHER; note = 2'-O-Methyl-guanosine
  modified_base 80: mod_base = OTHER; note = 2'-O-Methyl-uridine
  modified_base 82: mod_base = OTHER; note = 2'-O-Methyl-guanosine
  modified_base 83: mod_base = OTHER; note = 2'-O-Methyl-cytidine
  modified_base 84: mod_base = OTHER; note = 2'-O-Methyl-adenosine
  modified_base 85: mod_base = OTHER; note = 2'-O-Methyl-cytidine
  modified_base 86: mod_base = OTHER; note = 2'-O-Methyl-cytidine
  modified_base 87: mod_base = OTHER; note = 2'-O-Methyl-guanosine
  modified_base 89: mod_base = OTHER; note = 2'-O-Methyl-guanosine
  modified_base 92: mod_base = OTHER; note = 2'-O-Methyl-guanosine
  modified_base 93: mod_base = OTHER; note = 2'-O-Methyl-guanosine
  modified_base 94: mod_base = OTHER; note = 2'-O-Methyl-uridine
  modified_base 95: mod_base = OTHER; note = 2'-O-Methyl-guanosine
  modified_base 96: mod_base = OTHER; note = 2'-O-Methyl-cytidine
  modified_base 97: mod_base = OTHER; note = 2'-O-Methyl-uridine
  modified_base 98: mod_base = OTHER; note = 2'-O-Methyl-uridine phosphorothioate
  modified_base 99: mod_base = OTHER; note = 2'-O-Methyl-uridine phosphorothioate
  modified_base 100: mod_base = OTHER; note = 2'-O-Methyl-uridine
  misc_difference 101: note = a, c, g, inosine, u, deoxyadenosine, deoxyguanosine, deoxycytidine, deoxyinosine, thymine, ribonebularine, 2'-O-methylnebularine, or 2'-deoxynebularine
  misc_difference 102: note = a, c, g, inosine, u, deoxyadenosine, deoxyguanosine, deoxycytidine, deoxyinosine, thymine, ribonebularine, 2'-O-methylnebularine, or 2'-deoxynebularine
  misc_difference 103: note = a, c, g, inosine, u, deoxyadenosine, deoxyguanosine, deoxycytidine, deoxyinosine, thymine, ribonebularine, 2'-O-methylnebularine, or 2'-deoxynebularine

SEQ ID NO: 3102 - RNA, 103 nt, synthetic construct; identical to SEQ ID NO: 1797
  source 1..103: mol_type = other RNA
  modified_base 1: mod_base = OTHER; note = 2'-O-Methyl-cytidine phosphorothioate
  modified_base 2: mod_base = OTHER; note = 2'-O-Methyl-adenosine phosphorothioate
  modified_base 3: mod_base = OTHER; note = 2'-O-Methyl-guanosine
  modified_base 21: mod_base = OTHER; note = 2'-O-Methyl-guanosine
  modified_base 25: mod_base = OTHER; note = uridine phosphorothioate
  modified_base 28: mod_base = OTHER; note = 2'-O-Methyl-adenosine
  modified_base 29: mod_base = OTHER; note = 2'-O-Methyl-guanosine
  modified_base 30: mod_base = OTHER; note = 2'-O-Methyl-cytidine
  modified_base 31: mod_base = OTHER; note = 2'-O-Methyl-uridine
  modified_base 32: mod_base = OTHER; note = 2'-O-Methyl-adenosine
  modified_base 33: mod_base = OTHER; note = 2'-O-Methyl-guanosine
  modified_base 34: mod_base = OTHER; note = 2'-O-Methyl-adenosine
  modified_base 35: mod_base = OTHER; note = 2'-O-Methyl-adenosine
  modified_base 36: mod_base = OTHER; note = 2'-O-Methyl-adenosine
  modified_base 37: mod_base = OTHER; note = 2'-O-Methyl-uridine
  modified_base 38: mod_base = OTHER; note = 2'-O-Methyl-adenosine
  modified_base 39: mod_base = OTHER; note = 2'-O-Methyl-guanosine
  modified_base 40: mod_base = OTHER; note = 2'-O-Methyl-cytidine
  modified_base 41: mod_base = OTHER; note = 2'-O-Methyl-adenosine
  modified_base 42: mod_base = OTHER; note = 2'-O-Methyl-adenosine
  modified_base 45: mod_base = OTHER; note = uridine phosphorothioate
  modified_base 46: mod_base = OTHER; note = 2'-O-Methyl-adenosine
  modified_base 48: mod_base = OTHER; note = 2'-O-Methyl-adenosine
  modified_base 50: mod_base = OTHER; note = 2'-O-Methyl-uridine
  modified_base 52: mod_base = OTHER; note = 2'-O-Methyl-adenosine
  modified_base 53: mod_base = OTHER; note = 2'-O-Methyl-guanosine
  modified_base 54: mod_base = OTHER; note = 2'-O-Methyl-guanosine
  modified_base 55: mod_base = OTHER; note = 2'-O-Methyl-cytidine
  modified_base 56: mod_base = OTHER; note = 2'-O-Methyl-uridine
  modified_base 57: mod_base = OTHER; note = 2'-O-Methyl-adenosine
  modified_base 60: mod_base = OTHER; note = 2'-O-Methyl-cytidine
  modified_base 61: mod_base = OTHER; note = 2'-O-Methyl-cytidine
  modified_base 64: mod_base = OTHER; note = uridine phosphorothioate
  modified_base 66: mod_base = OTHER; note = 2'-O-Methyl-uridine
  modified_base 67: mod_base = OTHER; note = 2'-O-Methyl-cytidine
  modified_base 70: mod_base = OTHER; note = 2'-O-Methyl-cytidine
  modified_base 71: mod_base = OTHER; note = 2'-O-Methyl-uridine
  modified_base 72: mod_base = OTHER; note = 2'-O-Methyl-uridine
  modified_base 74: mod_base = OTHER; note = 2'-O-Methyl-adenosine
  modified_base 75: mod_base = OTHER; note = 2'-O-Methyl-adenosine
  modified_base 76: mod_base = OTHER; note = 2'-O-Methyl-adenosine
  modified_base 77: mod_base = OTHER; note = 2'-O-Methyl-adenosine
  modified_base 78: mod_base = OTHER; note = 2'-O-Methyl-adenosine
  modified_base 79: mod_base = OTHER; note = 2'-O-Methyl-guanosine
  modified_base 80: mod_base = OTHER; note = 2'-O-Methyl-uridine
  modified_base 82: mod_base = OTHER; note = 2'-O-Methyl-guanosine
  modified_base 83: mod_base = OTHER; note = 2'-O-Methyl-cytidine
  modified_base 84: mod_base = OTHER; note = 2'-O-Methyl-adenosine
  modified_base 85: mod_base = OTHER; note = 2'-O-Methyl-cytidine
  modified_base 86: mod_base = OTHER; note = 2'-O-Methyl-cytidine
  modified_base 87: mod_base = OTHER; note = 2'-O-Methyl-guanosine
  modified_base 89: mod_base = OTHER; note = 2'-O-Methyl-guanosine
  modified_base 92: mod_base = OTHER; note = 2'-O-Methyl-guanosine
  modified_base 93: mod_base = OTHER; note = 2'-O-Methyl-guanosine
  modified_base 94: mod_base = OTHER; note = 2'-O-Methyl-uridine
  modified_base 95: mod_base = OTHER; note = 2'-O-Methyl-guanosine
  modified_base 96: mod_base = OTHER; note = 2'-O-Methyl-cytidine
  modified_base 97: mod_base = OTHER; note = 2'-O-Methyl-uridine
  modified_base 98: mod_base = OTHER; note = 2'-O-Methyl-uridine phosphorothioate
  modified_base 99: mod_base = OTHER; note = 2'-O-Methyl-uridine phosphorothioate
  modified_base 100: mod_base = OTHER; note = 2'-O-Methyl-uridine
  misc_difference 101: note = a, c, g, inosine, u, deoxyadenosine, deoxyguanosine, deoxycytidine, deoxyinosine, thymine, ribonebularine, 2'-O-methylnebularine, or 2'-deoxynebularine
  misc_difference 102: note = a, c, g, inosine, u, deoxyadenosine, deoxyguanosine, deoxycytidine, deoxyinosine, thymine, ribonebularine, 2'-O-methylnebularine, or 2'-deoxynebularine
  misc_difference 103: note = a, c, g, inosine, u, deoxyadenosine, deoxyguanosine, deoxycytidine, deoxyinosine, thymine, ribonebularine, 2'-O-methylnebularine, or 2'-deoxynebularine

SEQ ID NO: 3103 - RNA, 103 nt, synthetic construct; identical to SEQ ID NO: 1797
  source 1..103: mol_type = other RNA
  modified_base 1: mod_base = OTHER; note = 2'-O-Methyl-cytidine phosphorothioate
  modified_base 2: mod_base = OTHER; note = 2'-O-Methyl-adenosine phosphorothioate
  modified_base 3: mod_base = OTHER; note = 2'-O-Methyl-guanosine
  modified_base 21: mod_base = OTHER; note = 2'-O-Methyl-guanosine
  modified_base 25: mod_base = OTHER; note = uridine phosphorothioate
  modified_base 28: mod_base = OTHER; note = 2'-O-Methyl-adenosine
  modified_base 29: mod_base = OTHER; note = 2'-O-Methyl-guanosine
  modified_base 30: mod_base = OTHER; note = 2'-O-Methyl-cytidine
  modified_base 31: mod_base = OTHER; note = 2'-O-Methyl-uridine
  modified_base 32: mod_base = OTHER; note = 2'-O-Methyl-adenosine
  modified_base 33: mod_base = OTHER; note = 2'-O-Methyl-guanosine
  modified_base 34: mod_base = OTHER; note = 2'-O-Methyl-adenosine
  modified_base 35: mod_base = OTHER; note = 2'-O-Methyl-adenosine
  modified_base 36: mod_base = OTHER; note = 2'-O-Methyl-adenosine
  modified_base 37: mod_base = OTHER; note = 2'-O-Methyl-uridine
  modified_base 38: mod_base = OTHER; note = 2'-O-Methyl-adenosine
  modified_base 39: mod_base = OTHER; note = 2'-O-Methyl-guanosine
  modified_base 40: mod_base = OTHER; note = 2'-O-Methyl-cytidine
  modified_base 41: mod_base = OTHER; note = 2'-O-Methyl-adenosine
  modified_base 42: mod_base = OTHER; note = 2'-O-Methyl-adenosine
  modified_base 45: mod_base = OTHER; note = uridine phosphorothioate
  modified_base 46: mod_base = OTHER; note = 2'-O-Methyl-adenosine
  modified_base 48: mod_base = OTHER; note = 2'-O-Methyl-adenosine
  modified_base 50: mod_base = OTHER; note = 2'-O-Methyl-uridine
  modified_base 52: mod_base = OTHER; note = 2'-O-Methyl-adenosine
  modified_base 53: mod_base = OTHER; note = 2'-O-Methyl-guanosine
  modified_base 54: mod_base = OTHER; note = 2'-O-Methyl-guanosine
  modified_base 57: mod_base = OTHER; note = 2'-O-Methyl-adenosine
  modified_base 61: mod_base = OTHER; note = 2'-O-Methyl-cytidine
  modified_base 64: mod_base = OTHER; note = uridine phosphorothioate
  modified_base 66: mod_base = OTHER; note = 2'-O-Methyl-uridine
  modified_base 67: mod_base = OTHER; note = 2'-O-Methyl-cytidine
  modified_base 70: mod_base = OTHER; note = 2'-O-Methyl-cytidine
  modified_base 71: mod_base = OTHER; note = 2'-O-Methyl-uridine
  modified_base 72: mod_base = OTHER; note = 2'-O-Methyl-uridine
  modified_base 73: mod_base = OTHER; note = 2'-O-Methyl-guanosine
  modified_base 74: mod_base = OTHER; note = 2'-O-Methyl-adenosine
  modified_base 75: mod_base = OTHER; note = 2'-O-Methyl-adenosine
  modified_base 76: mod_base = OTHER; note = 2'-O-Methyl-adenosine
  modified_base 77: mod_base = OTHER; note = 2'-O-Methyl-adenosine
  modified_base 78: mod_base = OTHER; note = 2'-O-Methyl-adenosine
  modified_base 79: mod_base = OTHER; note = 2'-O-Methyl-guanosine
  modified_base 80: mod_base = OTHER; note = 2'-O-Methyl-uridine
  modified_base 82: mod_base = OTHER; note = 2'-O-Methyl-guanosine
  modified_base 83: mod_base = OTHER; note = 2'-O-Methyl-cytidine
  modified_base 84: mod_base = OTHER; note = 2'-O-Methyl-adenosine
  modified_base 85: mod_base = OTHER; note = 2'-O-Methyl-cytidine
  modified_base 86: mod_base = OTHER; note = 2'-O-Methyl-cytidine
  modified_base 87: mod_base = OTHER; note = 2'-O-Methyl-guanosine
  modified_base 89: mod_base = OTHER; note = 2'-O-Methyl-guanosine
  modified_base 92: mod_base = OTHER; note = 2'-O-Methyl-guanosine
  modified_base 93: mod_base = OTHER; note = 2'-O-Methyl-guanosine
  modified_base 94: mod_base = OTHER; note = 2'-O-Methyl-uridine
  modified_base 95: mod_base = OTHER; note = 2'-O-Methyl-guanosine
  modified_base 96: mod_base = OTHER; note = 2'-O-Methyl-cytidine
  modified_base 97: mod_base = OTHER; note = 2'-O-Methyl-uridine
  modified_base 98: mod_base = OTHER; note = 2'-O-Methyl-uridine phosphorothioate
  modified_base 99: mod_base = OTHER; note = 2'-O-Methyl-uridine phosphorothioate
  modified_base 100: mod_base = OTHER; note = 2'-O-Methyl-uridine
  misc_difference 101: note = a, c, g, inosine, u, deoxyadenosine, deoxyguanosine, deoxycytidine, deoxyinosine, thymine, ribonebularine, 2'-O-methylnebularine, or 2'-deoxynebularine
  misc_difference 102: note = a, c, g, inosine, u, deoxyadenosine, deoxyguanosine, deoxycytidine, deoxyinosine, thymine, ribonebularine, 2'-O-methylnebularine, or 2'-deoxynebularine
  misc_difference 103: note = a, c, g, inosine, u, deoxyadenosine, deoxyguanosine, deoxycytidine, deoxyinosine, thymine, ribonebularine, 2'-O-methylnebularine, or 2'-deoxynebularine

SEQ ID NO: 3104 - RNA, 103 nt, synthetic construct; identical to SEQ ID NO: 1797
  source 1..103: mol_type = other RNA
  modified_base 1: mod_base = OTHER; note = 2'-O-Methyl-cytidine phosphorothioate
  modified_base 2: mod_base = OTHER; note = 2'-O-Methyl-adenosine phosphorothioate
  modified_base 3: mod_base = OTHER; note = 2'-O-Methyl-guanosine
  modified_base 21: mod_base = OTHER; note = 2'-O-Methyl-guanosine
  modified_base 25: mod_base = OTHER; note = uridine phosphorothioate
  modified_base 28: mod_base = OTHER; note = 2'-O-Methyl-adenosine
  modified_base 29: mod_base = OTHER; note = 2'-O-Methyl-guanosine
  modified_base 30: mod_base = OTHER; note = 2'-O-Methyl-cytidine
  modified_base 31: mod_base = OTHER; note = 2'-O-Methyl-uridine
  modified_base 32: mod_base = OTHER; note = 2'-O-Methyl-adenosine
  modified_base 33: mod_base = OTHER; note = 2'-O-Methyl-guanosine
  modified_base 34: mod_base = OTHER; note = 2'-O-Methyl-adenosine
  modified_base 35: mod_base = OTHER; note = 2'-O-Methyl-adenosine
  modified_base 36: mod_base = OTHER; note = 2'-O-Methyl-adenosine
  modified_base 37: mod_base = OTHER; note = 2'-O-Methyl-uridine
  modified_base 38: mod_base = OTHER; note = 2'-O-Methyl-adenosine
  modified_base 39: mod_base = OTHER; note = 2'-O-Methyl-guanosine
  modified_base 40: mod_base = OTHER; note = 2'-O-Methyl-cytidine
  modified_base 41: mod_base = OTHER; note = 2'-O-Methyl-adenosine
  modified_base 42: mod_base = OTHER; note = 2'-O-Methyl-adenosine
  modified_base 45: mod_base = OTHER; note = uridine phosphorothioate
  modified_base 46: mod_base = OTHER; note = 2'-O-Methyl-adenosine
  modified_base 48: mod_base = OTHER; note = 2'-O-Methyl-adenosine
  modified_base 50: mod_base = OTHER; note = 2'-O-Methyl-uridine
  modified_base 52: mod_base = OTHER; note = 2'-O-Methyl-adenosine
  modified_base 53: mod_base = OTHER; note = 2'-O-Methyl-guanosine
  modified_base 54: mod_base = OTHER; note = 2'-O-Methyl-guanosine
  modified_base 57: mod_base = OTHER; note = 2'-O-Methyl-adenosine
  modified_base 61: mod_base = OTHER; note = 2'-O-Methyl-cytidine
  modified_base 64: mod_base = OTHER; note = uridine phosphorothioate
  modified_base 66: mod_base = OTHER; note = 2'-O-Methyl-uridine
  modified_base 67: mod_base = OTHER; note = 2'-O-Methyl-cytidine
  modified_base 70: mod_base = OTHER; note = 2'-O-Methyl-cytidine
  modified_base 71: mod_base = OTHER; note = 2'-O-Methyl-uridine
  modified_base 72: mod_base = OTHER; note = 2'-O-Methyl-uridine
  modified_base 73: mod_base = OTHER; note = 2'-O-Methyl-guanosine
  modified_base 74: mod_base = OTHER; note = 2'-O-Methyl-adenosine
  modified_base 75: mod_base = OTHER; note = 2'-O-Methyl-adenosine
  modified_base 76: mod_base = OTHER; note = 2'-O-Methyl-adenosine
  modified_base 77: mod_base = OTHER; note = 2'-O-Methyl-adenosine
  modified_base 78: mod_base = OTHER; note = 2'-O-Methyl-adenosine
  modified_base 79: mod_base = OTHER; note = 2'-O-Methyl-guanosine
  modified_base 80: mod_base = OTHER; note = 2'-O-Methyl-uridine
  modified_base 82: mod_base = OTHER; note = 2'-O-Methyl-guanosine
  modified_base 83: mod_base = OTHER; note = 2'-O-Methyl-cytidine
  modified_base 84: mod_base = OTHER; note = 2'-O-Methyl-adenosine
  modified_base 85: mod_base = OTHER; note = 2'-O-Methyl-cytidine
  modified_base 86: mod_base = OTHER; note = 2'-O-Methyl-cytidine
  modified_base 87: mod_base = OTHER; note = 2'-O-Methyl-guanosine
  modified_base 89: mod_base = OTHER; note = 2'-O-Methyl-guanosine
  modified_base 91: mod_base = OTHER; note = 2'-O-Methyl-cytidine
  modified_base 92: mod_base = OTHER; note = 2'-O-Methyl-guanosine
  modified_base 93: mod_base = OTHER; note = 2'-O-Methyl-guanosine
  modified_base 94: mod_base = OTHER; note = 2'-O-Methyl-uridine
  modified_base 95: mod_base = OTHER; note = 2'-O-Methyl-guanosine
  modified_base 96: mod_base = OTHER; note = 2'-O-Methyl-cytidine
  modified_base 97: mod_base = OTHER; note = 2'-O-Methyl-uridine
  modified_base 98: mod_base = OTHER; note = 2'-O-Methyl-uridine phosphorothioate
  modified_base 99: mod_base = OTHER; note = 2'-O-Methyl-uridine phosphorothioate
  modified_base 100: mod_base = OTHER; note = 2'-O-Methyl-uridine
  misc_difference 101: note = a, c, g, inosine, u, deoxyadenosine, deoxyguanosine, deoxycytidine, deoxyinosine, thymine, ribonebularine, 2'-O-methylnebularine, or 2'-deoxynebularine
  misc_difference 102: note = a, c, g, inosine, u, deoxyadenosine, deoxyguanosine, deoxycytidine, deoxyinosine, thymine, ribonebularine, 2'-O-methylnebularine, or 2'-deoxynebularine
  misc_difference 103: note = a, c, g, inosine, u, deoxyadenosine, deoxyguanosine, deoxycytidine, deoxyinosine, thymine, ribonebularine, 2'-O-methylnebularine, or 2'-deoxynebularine

SEQ ID NO: 3105 - RNA, 103 nt, synthetic construct; identical to SEQ ID NO: 1797
  source 1..103: mol_type = other RNA
  modified_base 1: mod_base = OTHER; note = 2'-O-Methyl-cytidine phosphorothioate
  modified_base 2: mod_base = OTHER; note = 2'-O-Methyl-adenosine phosphorothioate
  modified_base 3: mod_base = OTHER; note = 2'-O-Methyl-guanosine
  modified_base 21: mod_base = OTHER; note = 2'-O-Methyl-guanosine
  modified_base 25: mod_base = OTHER; note = uridine phosphorothioate
  modified_base 28: mod_base = OTHER; note = 2'-O-Methyl-adenosine
  modified_base 29: mod_base = OTHER; note = 2'-O-Methyl-guanosine
  modified_base 30: mod_base = OTHER; note = 2'-O-Methyl-cytidine
  modified_base 31: mod_base = OTHER; note = 2'-O-Methyl-uridine
  modified_base 32: mod_base = OTHER; note = 2'-O-Methyl-adenosine
  modified_base 34: mod_base = OTHER; note = 2'-O-Methyl-adenosine
  modified_base 35: mod_base = OTHER; note = 2'-O-Methyl-adenosine
  modified_base 36: mod_base = OTHER; note = 2'-O-Methyl-adenosine
  modified_base 37: mod_base = OTHER; note = 2'-O-Methyl-uridine
  modified_base 38: mod_base = OTHER; note = 2'-O-Methyl-adenosine
  modified_base 39: mod_base = OTHER; note = 2'-O-Methyl-guanosine
  modified_base 40: mod_base = OTHER; note = 2'-O-Methyl-cytidine
  modified_base 41: mod_base = OTHER; note = 2'-O-Methyl-adenosine
  modified_base 42: mod_base = OTHER; note = 2'-O-Methyl-adenosine
  modified_base 45: mod_base = OTHER; note = uridine phosphorothioate
  modified_base 46: mod_base = OTHER; note = 2'-O-Methyl-adenosine
  modified_base 48: mod_base = OTHER; note = 2'-O-Methyl-adenosine
  modified_base 50: mod_base = OTHER; note = 2'-O-Methyl-uridine
  modified_base 52: mod_base = OTHER; note = 2'-O-Methyl-adenosine
  modified_base 53: mod_base = OTHER; note = 2'-O-Methyl-guanosine
  modified_base 54: mod_base = OTHER; note = 2'-O-Methyl-guanosine
  modified_base 57: mod_base = OTHER; note = 2'-O-Methyl-adenosine
  modified_base 61: mod_base = OTHER; note = 2'-O-Methyl-cytidine
  modified_base 64: mod_base = OTHER; note = uridine phosphorothioate
  modified_base 66: mod_base = OTHER; note = 2'-O-Methyl-uridine
  modified_base 67: mod_base = OTHER; note = 2'-O-Methyl-cytidine
  modified_base 70: mod_base = OTHER; note = 2'-O-Methyl-cytidine
  modified_base 71: mod_base = OTHER; note = 2'-O-Methyl-uridine
  modified_base 72: mod_base = OTHER; note = 2'-O-Methyl-uridine
  modified_base 73: mod_base = OTHER; note = 2'-O-Methyl-guanosine
  modified_base 74: mod_base = OTHER; note = 2'-O-Methyl-adenosine
  modified_base 75: mod_base = OTHER; note = 2'-O-Methyl-adenosine
  modified_base 76: mod_base = OTHER; note = 2'-O-Methyl-adenosine
  modified_base 77: mod_base = OTHER; note = 2'-O-Methyl-adenosine
  modified_base 78: mod_base = OTHER; note = 2'-O-Methyl-adenosine
  modified_base 79: mod_base = OTHER; note = 2'-O-Methyl-guanosine
  modified_base 80: mod_base = OTHER; note = 2'-O-Methyl-uridine
  modified_base 82: mod_base = OTHER; note = 2'-O-Methyl-guanosine
  modified_base 83: mod_base = OTHER; note = 2'-O-Methyl-cytidine
  modified_base 84: mod_base = OTHER; note = 2'-O-Methyl-adenosine
  modified_base 85: mod_base = OTHER; note = 2'-O-Methyl-cytidine
  modified_base 86: mod_base = OTHER; note = 2'-O-Methyl-cytidine
  modified_base 87: mod_base = OTHER; note = 2'-O-Methyl-guanosine
  modified_base 89: mod_base = OTHER; note = 2'-O-Methyl-guanosine
  modified_base 92: mod_base = OTHER; note = 2'-O-Methyl-guanosine
  modified_base 93: mod_base = OTHER; note = 2'-O-Methyl-guanosine
  modified_base 94: mod_base = OTHER; note = 2'-O-Methyl-uridine
  modified_base 95: mod_base = OTHER; note = 2'-O-Methyl-guanosine
  modified_base 96: mod_base = OTHER; note = 2'-O-Methyl-cytidine
  modified_base 97: mod_base = OTHER; note = 2'-O-Methyl-uridine
  modified_base 98: mod_base = OTHER; note = 2'-O-Methyl-uridine phosphorothioate
  modified_base 99: mod_base = OTHER; note = 2'-O-Methyl-uridine phosphorothioate
  modified_base 100: mod_base = OTHER; note = 2'-O-Methyl-uridine
  misc_difference 101: note = a, c, g, inosine, u, deoxyadenosine, deoxyguanosine, deoxycytidine, deoxyinosine, thymine, ribonebularine, 2'-O-methylnebularine, or 2'-deoxynebularine
  misc_difference 102: note = a, c, g, inosine, u, deoxyadenosine, deoxyguanosine, deoxycytidine, deoxyinosine, thymine, ribonebularine, 2'-O-methylnebularine, or 2'-deoxynebularine
  misc_difference 103: note = a, c, g, inosine, u, deoxyadenosine, deoxyguanosine, deoxycytidine, deoxyinosine, thymine, ribonebularine, 2'-O-methylnebularine, or 2'-deoxynebularine

SEQ ID NO: 3106 - RNA, 103 nt, synthetic construct; identical to SEQ ID NO: 1797
  source 1..103: mol_type = other RNA
  modified_base 1: mod_base = OTHER; note = 2'-O-Methyl-cytidine phosphorothioate
  modified_base 2: mod_base = OTHER; note = 2'-O-Methyl-adenosine phosphorothioate
  modified_base 3: mod_base = OTHER; note = 2'-O-Methyl-guanosine
  modified_base 21: mod_base = OTHER; note = 2'-O-Methyl-guanosine
  modified_base 25: mod_base = OTHER; note = uridine phosphorothioate
  modified_base 28: mod_base = OTHER; note = 2'-O-Methyl-adenosine
  modified_base 29: mod_base = OTHER; note = 2'-O-Methyl-guanosine
  modified_base 30: mod_base = OTHER; note = 2'-O-Methyl-cytidine
  modified_base 31: mod_base = OTHER; note = 2'-O-Methyl-uridine
  modified_base 32: mod_base = OTHER; note = 2'-O-Methyl-adenosine
  modified_base 34: mod_base = OTHER; note = 2'-O-Methyl-adenosine
  modified_base 35: mod_base = OTHER; note = 2'-O-Methyl-adenosine
  modified_base 36: mod_base = OTHER; note = 2'-O-Methyl-adenosine
  modified_base 37: mod_base = OTHER; note = 2'-O-Methyl-uridine
  modified_base 38: mod_base = OTHER; note = 2'-O-Methyl-adenosine
  modified_base 39: mod_base = OTHER; note = 2'-O-Methyl-guanosine
  modified_base 40: mod_base = OTHER; note = 2'-O-Methyl-cytidine
  modified_base 41: mod_base = OTHER; note = 2'-O-Methyl-adenosine
  modified_base 42: mod_base = OTHER; note = 2'-O-Methyl-adenosine
  modified_base 45: mod_base = OTHER; note = uridine phosphorothioate
  modified_base 46: mod_base = OTHER; note = 2'-O-Methyl-adenosine
  modified_base 48: mod_base = OTHER; note = 2'-O-Methyl-adenosine
  modified_base 50: mod_base = OTHER; note = 2'-O-Methyl-uridine
  modified_base 52: mod_base = OTHER; note = 2'-O-Methyl-adenosine
  modified_base 53: mod_base = OTHER; note = 2'-O-Methyl-guanosine
  modified_base 54: mod_base = OTHER; note = 2'-O-Methyl-guanosine
  modified_base 57: mod_base = OTHER; note = 2'-O-Methyl-adenosine
  modified_base 61: mod_base = OTHER; note = 2'-O-Methyl-cytidine
  modified_base 64: mod_base = OTHER; note = uridine phosphorothioate
  modified_base 66: mod_base = OTHER; note = 2'-O-Methyl-uridine
  modified_base 67: mod_base = OTHER; note = 2'-O-Methyl-cytidine
  modified_base 70: mod_base = OTHER; note = 2'-O-Methyl-cytidine
  modified_base 71: mod_base = OTHER; note = 2'-O-Methyl-uridine
  modified_base 72: mod_base = OTHER; note = 2'-O-Methyl-uridine
  modified_base 73: mod_base = OTHER; note = 2'-O-Methyl-guanosine
  modified_base 74: mod_base = OTHER; note = 2'-O-Methyl-adenosine
  modified_base 75: mod_base = OTHER; note = 2'-O-Methyl-adenosine
  modified_base 76: mod_base = OTHER; note = 2'-O-Methyl-adenosine
  modified_base 77: mod_base = OTHER; note = 2'-O-Methyl-adenosine
  modified_base 78: mod_base = OTHER; note = 2'-O-Methyl-adenosine
  modified_base 79: mod_base = OTHER; note = 2'-O-Methyl-guanosine
  modified_base 80: mod_base = OTHER; note = 2'-O-Methyl-uridine
  modified_base 82: mod_base = OTHER; note = 2'-O-Methyl-guanosine
  modified_base 83: mod_base = OTHER; note = 2'-O-Methyl-cytidine
  modified_base 84: mod_base = OTHER; note = 2'-O-Methyl-adenosine
  modified_base 85: mod_base = OTHER; note = 2'-O-Methyl-cytidine
  modified_base 86: mod_base = OTHER; note = 2'-O-Methyl-cytidine
  modified_base 87: mod_base = OTHER; note = 2'-O-Methyl-guanosine
  modified_base 89: mod_base = OTHER; note = 2'-O-Methyl-guanosine
  modified_base 91: mod_base = OTHER; note = 2'-O-Methyl-cytidine
  modified_base 92: mod_base = OTHER; note = 2'-O-Methyl-guanosine
  modified_base 93: mod_base = OTHER; note = 2'-O-Methyl-guanosine
  modified_base 94: mod_base = OTHER; note = 2'-O-Methyl-uridine
  modified_base 95: mod_base = OTHER; note = 2'-O-Methyl-guanosine
  modified_base 96: mod_base = OTHER; note = 2'-O-Methyl-cytidine
  modified_base 97: mod_base = OTHER; note = 2'-O-Methyl-uridine
  modified_base 98: mod_base = OTHER; note = 2'-O-Methyl-uridine phosphorothioate
  modified_base 99: mod_base = OTHER; note = 2'-O-Methyl-uridine phosphorothioate
  modified_base 100: mod_base = OTHER; note = 2'-O-Methyl-uridine
  misc_difference 101: note = a, c, g, inosine, u, deoxyadenosine, deoxyguanosine, deoxycytidine, deoxyinosine, thymine, ribonebularine, 2'-O-methylnebularine, or 2'-deoxynebularine
  misc_difference 102: note = a, c, g, inosine, u, deoxyadenosine, deoxyguanosine, deoxycytidine, deoxyinosine, thymine, ribonebularine, 2'-O-methylnebularine, or 2'-deoxynebularine
  misc_difference 103: note = a, c, g, inosine, u, deoxyadenosine, deoxyguanosine, deoxycytidine, deoxyinosine, thymine, ribonebularine, 2'-O-methylnebularine, or 2'-deoxynebularine

SEQ ID NO: 3107 - RNA, 103 nt, synthetic construct; identical to SEQ ID NO: 1797
  source 1..103: mol_type = other RNA
  modified_base 1: mod_base = OTHER; note = 2'-O-Methyl-cytidine phosphorothioate
  modified_base 2: mod_base = OTHER; note = 2'-O-Methyl-adenosine phosphorothioate
  modified_base 3: mod_base = OTHER; note = 2'-O-Methyl-guanosine
  modified_base 21: mod_base = OTHER; note = 2'-O-Methyl-guanosine
  modified_base 25: mod_base = OTHER; note = uridine phosphorothioate
  modified_base 28: mod_base = OTHER; note = 2'-O-Methyl-adenosine
  modified_base 29: mod_base = OTHER; note = 2'-O-Methyl-guanosine
  modified_base 30: mod_base = OTHER; note = 2'-O-Methyl-cytidine
  modified_base 31: mod_base = OTHER; note = 2'-O-Methyl-uridine
  modified_base 32: mod_base = OTHER; note = 2'-O-Methyl-adenosine
  modified_base 34: mod_base = OTHER; note = 2'-O-Methyl-adenosine
  modified_base 35: mod_base = OTHER; note = 2'-O-Methyl-adenosine
  modified_base 36: mod_base = OTHER; note = 2'-O-Methyl-adenosine
  modified_base 37: mod_base = OTHER; note = 2'-O-Methyl-uridine
  modified_base 38: mod_base = OTHER; note = 2'-O-Methyl-adenosine
  modified_base 39: mod_base = OTHER; note = 2'-O-Methyl-guanosine
  modified_base 40: mod_base = OTHER; note = 2'-O-Methyl-cytidine
  modified_base 41: mod_base = OTHER; note = 2'-O-Methyl-adenosine
  modified_base 42: mod_base = OTHER; note = 2'-O-Methyl-adenosine
  modified_base 45: mod_base = OTHER; note = uridine phosphorothioate
  modified_base 46: mod_base = OTHER; note = 2'-O-Methyl-adenosine
  modified_base 48: mod_base = OTHER; note = 2'-O-Methyl-adenosine
  modified_base 50: mod_base = OTHER; note = 2'-O-Methyl-uridine
  modified_base 52: mod_base = OTHER; note = 2'-O-Methyl-adenosine
  modified_base 53: mod_base = OTHER; note = 2'-O-Methyl-guanosine
  modified_base 54: mod_base = OTHER; note = 2'-O-Methyl-guanosine
  modified_base 55: mod_base = OTHER; note = 2'-O-Methyl-cytidine
  modified_base 56: mod_base = OTHER; note = 2'-O-Methyl-uridine
  modified_base 57: mod_base = OTHER; note = 2'-O-Methyl-adenosine
  modified_base 60: mod_base = OTHER; note = 2'-O-Methyl-cytidine
  modified_base 61: mod_base = OTHER; note = 2'-O-Methyl-cytidine
  modified_base 64: mod_base = OTHER; note = uridine phosphorothioate
  modified_base 66: mod_base = OTHER; note = 2'-O-Methyl-uridine
  modified_base 67: mod_base = OTHER; note = 2'-O-Methyl-cytidine
  modified_base 70: mod_base = OTHER; note = 2'-O-Methyl-cytidine
  modified_base 71: mod_base = OTHER; note = 2'-O-Methyl-uridine
  modified_base 72: mod_base = OTHER; note = 2'-O-Methyl-uridine
  modified_base 74: mod_base = OTHER; note = 2'-O-Methyl-adenosine
  modified_base 75: mod_base = OTHER; note = 2'-O-Methyl-adenosine
  modified_base 76: mod_base = OTHER; note = 2'-O-Methyl-adenosine
  modified_base 77: mod_base = OTHER; note = 2'-O-Methyl-adenosine
  modified_base 78: mod_base = OTHER; note = 2'-O-Methyl-adenosine
  modified_base 79: mod_base = OTHER; note = 2'-O-Methyl-guanosine
  modified_base 80: mod_base = OTHER; note = 2'-O-Methyl-uridine
  modified_base 82: mod_base = OTHER; note = 2'-O-Methyl-guanosine
  modified_base 83: mod_base = OTHER; note = 2'-O-Methyl-cytidine
  modified_base 84: mod_base = OTHER; note = 2'-O-Methyl-adenosine
  modified_base 85: mod_base = OTHER; note = 2'-O-Methyl-cytidine
  modified_base 86: mod_base = OTHER; note = 2'-O-Methyl-cytidine
  modified_base 87: mod_base = OTHER; note = 2'-O-Methyl-guanosine
  modified_base 89: mod_base = OTHER; note = 2'-O-Methyl-guanosine
  modified_base 92: mod_base = OTHER; note = 2'-O-Methyl-guanosine
  modified_base 93: mod_base = OTHER; note = 2'-O-Methyl-guanosine
  modified_base 94: mod_base = OTHER; note = 2'-O-Methyl-uridine
  modified_base 95: mod_base = OTHER; note = 2'-O-Methyl-guanosine
  modified_base 96: mod_base = OTHER; note = 2'-O-Methyl-cytidine
  modified_base 97: mod_base = OTHER; note = 2'-O-Methyl-uridine
  modified_base 98: mod_base = OTHER; note = 2'-O-Methyl-uridine phosphorothioate
  modified_base 99: mod_base = OTHER; note = 2'-O-Methyl-uridine phosphorothioate
  modified_base 100: mod_base = OTHER; note = 2'-O-Methyl-uridine
  misc_difference 101: note = a, c, g, inosine, u, deoxyadenosine, deoxyguanosine, deoxycytidine, deoxyinosine, thymine, ribonebularine, 2'-O-methylnebularine, or 2'-deoxynebularine
  misc_difference 102: note = a, c, g, inosine, u, deoxyadenosine, deoxyguanosine, deoxycytidine, deoxyinosine, thymine, ribonebularine, 2'-O-methylnebularine, or 2'-deoxynebularine
  misc_difference 103: note = a, c, g, inosine, u, deoxyadenosine, deoxyguanosine, deoxycytidine, deoxyinosine, thymine, ribonebularine, 2'-O-methylnebularine, or 2'-deoxynebularine

SEQ ID NO: 3108 - RNA, 100 nt, synthetic construct; identical to SEQ ID NO: 1905
  source 1..100: mol_type = other RNA
  modified_base 1: mod_base = OTHER; note = 2'-O-Methyl-cytidine phosphorothioate
  modified_base 2: mod_base = OTHER; note = 2'-O-Methyl-adenosine phosphorothioate
  modified_base 3: mod_base = OTHER; note = 2'-O-Methyl-guanosine phosphorothioate
  modified_base 9: mod_base = OTHER; note = ribonebularine
  modified_base 14: mod_base = OTHER; note = ribonebularine
  modified_base 21: mod_base = OTHER; note = 2'-O-Methyl-guanosine
  modified_base 28: mod_base = OTHER; note = 2'-O-Methyl-adenosine
  modified_base 29: mod_base = OTHER; note = 2'-O-Methyl-guanosine
  modified_base 30: mod_base = OTHER; note = 2'-O-Methyl-cytidine
  modified_base 31: mod_base = OTHER; note = 2'-O-Methyl-uridine
  modified_base 32: mod_base = OTHER; note = 2'-O-Methyl-adenosine
  modified_base 33: mod_base = OTHER; note = 2'-O-Methyl-guanosine
  modified_base 34: mod_base = OTHER; note = 2'-O-methylnebularine
  modified_base 35: mod_base = OTHER; note = 2'-O-Methyl-adenosine
  modified_base 36: mod_base = OTHER; note = 2'-O-Methyl-adenosine
  modified_base 37: mod_base = OTHER; note = 2'-O-Methyl-uridine
  modified_base 38: mod_base = OTHER; note = 2'-O-Methyl-adenosine
  modified_base 39: mod_base = OTHER; note = 2'-O-Methyl-guanosine
  modified_base 40: mod_base = OTHER; note = 2'-O-Methyl-cytidine
  modified_base 41: mod_base = OTHER; note = 2'-O-Methyl-adenosine
  modified_base 42: mod_base = OTHER; note = 2'-O-Methyl-adenosine
  modified_base 46: mod_base = OTHER; note = 2'-O-Methyl-adenosine
  modified_base 48: mod_base = OTHER; note = 2'-O-Methyl-adenosine
  modified_base 50: mod_base = OTHER; note = 2'-O-Methyl-uridine
  modified_base 52: mod_base = OTHER; note = 2'-O-Methyl-adenosine
  modified_base 53: mod_base = OTHER; note = 2'-O-Methyl-guanosine
  modified_base 54: mod_base = OTHER; note = 2'-O-Methyl-guanosine
  modified_base 55: mod_base = OTHER; note = 2'-O-Methyl-cytidine
  modified_base 56: mod_base = OTHER; note = 2'-O-Methyl-uridine
  modified_base 57: mod_base = OTHER; note = 2'-O-Methyl-adenosine
  modified_base 60: mod_base = OTHER; note = 2'-O-Methyl-cytidine
  modified_base 61: mod_base = OTHER; note = 2'-O-Methyl-cytidine
  modified_base 66: mod_base = OTHER; note = 2'-O-Methyl-uridine
  modified_base 67: mod_base = OTHER; note = 2'-O-Methyl-cytidine
  modified_base 70: mod_base = OTHER; note = 2'-O-Methyl-cytidine
  modified_base 71: mod_base = OTHER; note = 2'-O-Methyl-uridine
  modified_base 72: mod_base = OTHER; note = 2'-O-Methyl-uridine
  modified_base 73: mod_base = OTHER; note = 2'-O-Methyl-guanosine
  modified_base 74: mod_base = OTHER; note = 2'-O-Methyl-adenosine
  modified_base 75: mod_base = OTHER; note = 2'-O-Methyl-adenosine
  modified_base 76: mod_base = OTHER; note = 2'-O-Methyl-adenosine
  modified_base 77: mod_base = OTHER; note = 2'-O-Methyl-adenosine
  modified_base 78: mod_base = OTHER; note = 2'-O-Methyl-adenosine
  modified_base 79: mod_base = OTHER; note = 2'-O-Methyl-guanosine
  modified_base 80: mod_base = OTHER; note = 2'-O-Methyl-uridine
  modified_base 81: mod_base = OTHER; note = 2'-O-Methyl-guanosine
  modified_base 83: mod_base = OTHER; note = 2'-O-Methyl-cytidine
  modified_base 84: mod_base = OTHER; note = 2'-O-Methyl-adenosine
  modified_base 85: mod_base = OTHER; note = 2'-O-Methyl-cytidine
  modified_base 86: mod_base = OTHER; note = 2'-O-Methyl-cytidine
  modified_base 87: mod_base = OTHER; note = 2'-O-Methyl-guanosine
  modified_base 88: mod_base = OTHER; note = 2'-O-Methyl-adenosine
  modified_base 89: mod_base = OTHER; note = 2'-O-Methyl-guanosine
  modified_base 90: mod_base = OTHER; note = 2'-O-Methyl-uridine
  modified_base 91: mod_base = OTHER; note = 2'-O-Methyl-cytidine
  modified_base 92: mod_base = OTHER; note = 2'-O-Methyl-guanosine
  modified_base 93: mod_base = OTHER; note = 2'-O-Methyl-guanosine
  modified_base 94: mod_base = OTHER; note = 2'-O-Methyl-uridine
  modified_base 95: mod_base = OTHER; note = 2'-O-Methyl-guanosine
  modified_base 96: mod_base = OTHER; note = 2'-O-Methyl-cytidine
  modified_base 97: mod_base = OTHER; note = 2'-O-Methyl-uridine phosphorothioate
  modified_base 98: mod_base = OTHER; note = 2'-O-Methyl-uridine phosphorothioate
  modified_base 99: mod_base = OTHER; note = 2'-O-Methyl-uridine phosphorothioate
  modified_base 100: mod_base = OTHER; note = 2'-O-Methyl-uridine

SEQ ID NO: 3109 - RNA, 100 nt, synthetic construct; identical to SEQ ID NO: 1917
  source 1..100: mol_type = other RNA
  modified_base 1: mod_base = OTHER; note = 2'-O-Methyl-cytidine phosphorothioate
  modified_base 2: mod_base = OTHER; note = 2'-O-Methyl-adenosine phosphorothioate
  modified_base 3: mod_base = OTHER; note = 2'-O-Methyl-guanosine phosphorothioate
  modified_base 14: mod_base = OTHER; note = ribonebularine
  modified_base 21: mod_base = OTHER; note = 2'-O-Methyl-guanosine
  modified_base 28: mod_base = OTHER; note = 2'-O-Methyl-adenosine
  modified_base 29: mod_base = OTHER; note = 2'-O-Methyl-guanosine
  modified_base 30: mod_base = OTHER; note = 2'-O-Methyl-cytidine
  modified_base 31: mod_base = OTHER; note = 2'-O-Methyl-uridine
  modified_base 32: mod_base = OTHER; note = 2'-O-Methyl-adenosine
  modified_base 33: mod_base = OTHER; note = 2'-O-Methyl-guanosine
  modified_base 34: mod_base = OTHER; note = 2'-O-Methyl-adenosine
  modified_base 35: mod_base = OTHER; note = 2'-O-Methyl-adenosine
  modified_base 36: mod_base = OTHER; note = 2'-O-Methyl-adenosine
  modified_base 37: mod_base = OTHER; note = 2'-O-Methyl-uridine
  modified_base 38: mod_base = OTHER; note = 2'-O-Methyl-adenosine
  modified_base 39: mod_base = OTHER; note = 2'-O-Methyl-guanosine
  modified_base 40: mod_base = OTHER; note = 2'-O-Methyl-cytidine
  modified_base 41: mod_base = OTHER; note = 2'-O-Methyl-adenosine
  modified_base 42: mod_base = OTHER; note = 2'-O-Methyl-adenosine
  modified_base 46: mod_base = OTHER; note = 2'-O-Methyl-adenosine
  modified_base 48: mod_base = OTHER; note = 2'-O-Methyl-adenosine
  modified_base 50: mod_base = OTHER; note = 2'-O-Methyl-uridine
  modified_base 52: mod_base = OTHER; note = 2'-O-Methyl-adenosine
  modified_base 53: mod_base = OTHER; note = 2'-O-Methyl-guanosine
  modified_base 54: mod_base = OTHER; note = 2'-O-Methyl-guanosine
  modified_base 55: mod_base = OTHER; note = 2'-O-Methyl-cytidine
  modified_base 56: mod_base = OTHER; note = 2'-O-Methyl-uridine
  modified_base 57: mod_base = OTHER; note = 2'-O-methylnebularine
  modified_base 60: mod_base = OTHER; note = 2'-O-Methyl-cytidine
  modified_base 61: mod_base = OTHER; note = 2'-O-Methyl-cytidine
  modified_base 66: mod_base = OTHER; note = 2'-O-Methyl-uridine
  modified_base 67: mod_base = OTHER; note = 2'-O-Methyl-cytidine
  modified_base 70: mod_base = OTHER; note = 2'-O-Methyl-cytidine
  modified_base 71: mod_base = OTHER; note = 2'-O-Methyl-uridine
  modified_base 72: mod_base = OTHER; note = 2'-O-Methyl-uridine
  modified_base 73: mod_base = OTHER; note = 2'-O-Methyl-guanosine
  modified_base 74: mod_base = OTHER; note = 2'-O-Methyl-adenosine
  modified_base 75: mod_base = OTHER; note = 2'-O-Methyl-adenosine
  modified_base 76: mod_base = OTHER; note = 2'-O-Methyl-adenosine
  modified_base 77: mod_base = OTHER; note = 2'-O-Methyl-adenosine
  modified_base 78: mod_base = OTHER; note = 2'-O-Methyl-adenosine
  modified_base 79: mod_base = OTHER; note = 2'-O-Methyl-guanosine
  modified_base 80: mod_base = OTHER; note = 2'-O-Methyl-uridine
  modified_base 81: mod_base = OTHER; note = 2'-O-Methyl-guanosine
  modified_base 83: mod_base = OTHER; note = 2'-O-Methyl-cytidine
  modified_base 84: mod_base = OTHER; note = 2'-O-Methyl-adenosine
  modified_base 85: mod_base = OTHER; note = 2'-O-Methyl-cytidine
  modified_base 86: mod_base = OTHER; note = 2'-O-Methyl-cytidine
  modified_base 87: mod_base = OTHER; note = 2'-O-Methyl-guanosine
  modified_base 88: mod_base = OTHER; note = 2'-O-Methyl-adenosine
  modified_base 89: mod_base = OTHER; note = 2'-O-Methyl-guanosine
  modified_base 90: mod_base = OTHER; note = 2'-O-Methyl-uridine
  modified_base 91: mod_base = OTHER; note = 2'-O-Methyl-cytidine
  modified_base 92: mod_base = OTHER; note = 2'-O-Methyl-guanosine
  modified_base 93: mod_base = OTHER; note = 2'-O-Methyl-guanosine
  modified_base 94: mod_base = OTHER; note = 2'-O-Methyl-uridine
  modified_base 95: mod_base = OTHER; note = 2'-O-Methyl-guanosine
  modified_base 96: mod_base = OTHER; note = 2'-O-Methyl-cytidine
  modified_base 97: mod_base = OTHER; note = 2'-O-Methyl-uridine phosphorothioate
  modified_base 98: mod_base = OTHER; note = 2'-O-Methyl-uridine phosphorothioate
  modified_base 99: mod_base = OTHER; note = 2'-O-Methyl-uridine phosphorothioate
  modified_base 100: mod_base = OTHER; note = 2'-O-Methyl-uridine

SEQ ID NO: 3110 - RNA, 100 nt, synthetic construct; identical to SEQ ID NO: 1915
  source 1..100: mol_type = other RNA
  modified_base 1: mod_base = OTHER; note = 2'-O-Methyl-cytidine phosphorothioate
  modified_base 2: mod_base = OTHER; note = 2'-O-Methyl-adenosine phosphorothioate
  modified_base 3: mod_base = OTHER; note = 2'-O-Methyl-guanosine phosphorothioate
  modified_base 14: mod_base = OTHER; note = ribonebularine
  modified_base 21: mod_base = OTHER; note = 2'-O-Methyl-guanosine
  modified_base 28: mod_base = OTHER; note = 2'-O-Methyl-adenosine
  modified_base 29: mod_base = OTHER; note = 2'-O-Methyl-guanosine
  modified_base 30: mod_base = OTHER; note = 2'-O-Methyl-cytidine
  modified_base 31: mod_base = OTHER; note = 2'-O-Methyl-uridine
  modified_base 32: mod_base = OTHER; note = 2'-O-Methyl-adenosine
  modified_base 33: mod_base = OTHER; note = 2'-O-Methyl-guanosine
  modified_base 34: mod_base = OTHER; note = 2'-O-methylnebularine
  modified_base 35: mod_base = OTHER; note = 2'-O-Methyl-adenosine
  modified_base 36: mod_base = OTHER; note = 2'-O-Methyl-adenosine
  modified_base 37: mod_base = OTHER; note = 2'-O-Methyl-uridine
  modified_base 38: mod_base = OTHER; note = 2'-O-Methyl-adenosine
  modified_base 39: mod_base = OTHER; note = 2'-O-Methyl-guanosine
  modified_base 40: mod_base = OTHER; note = 2'-O-Methyl-cytidine
  modified_base 41: mod_base = OTHER; note = 2'-O-Methyl-adenosine
  modified_base 42: mod_base = OTHER; note = 2'-O-Methyl-adenosine
  modified_base 46: mod_base = OTHER; note = 2'-O-Methyl-adenosine
  modified_base 48: mod_base = OTHER; note = 2'-O-Methyl-adenosine
  modified_base 50: mod_base = OTHER; note = 2'-O-Methyl-uridine
  modified_base 52: mod_base = OTHER; note = 2'-O-Methyl-adenosine
  modified_base 53: mod_base = OTHER; note = 2'-O-Methyl-guanosine
  modified_base 54: mod_base = OTHER; note = 2'-O-Methyl-guanosine
  modified_base 55: mod_base = OTHER; note = 2'-O-Methyl-cytidine
  modified_base 56: mod_base = OTHER; note = 2'-O-Methyl-uridine
  modified_base 57: mod_base = OTHER; note = 2'-O-Methyl-adenosine
  modified_base 60: mod_base = OTHER; note = 2'-O-Methyl-cytidine
  modified_base 61: mod_base = OTHER; note = 2'-O-Methyl-cytidine
  modified_base 66: mod_base = OTHER; note = 2'-O-Methyl-uridine
  modified_base 67: mod_base = OTHER; note = 2'-O-Methyl-cytidine
  modified_base 70: mod_base = OTHER; note = 2'-O-Methyl-cytidine
  modified_base 71: mod_base = OTHER; note = 2'-O-Methyl-uridine
  modified_base 72: mod_base = OTHER; note = 2'-O-Methyl-uridine
  modified_base 73: mod_base = OTHER; note = 2'-O-Methyl-guanosine
  modified_base 74: mod_base = OTHER; note = 2'-O-Methyl-adenosine
  modified_base 75: mod_base = OTHER; note = 2'-O-Methyl-adenosine
  modified_base 76: mod_base = OTHER; note = 2'-O-Methyl-adenosine
  modified_base 77: mod_base = OTHER; note = 2'-O-Methyl-adenosine
  modified_base 78: mod_base = OTHER; note = 2'-O-Methyl-adenosine
  modified_base 79: mod_base = OTHER; note = 2'-O-Methyl-guanosine
  modified_base 80: mod_base = OTHER; note = 2'-O-Methyl-uridine
  modified_base 81: mod_base = OTHER; note = 2'-O-Methyl-guanosine
  modified_base 83: mod_base = OTHER; note = 2'-O-Methyl-cytidine
  modified_base 84: mod_base = OTHER; note = 2'-O-Methyl-adenosine
  modified_base 85: mod_base = OTHER; note = 2'-O-Methyl-cytidine
  modified_base 86: mod_base = OTHER; note = 2'-O-Methyl-cytidine
  modified_base 87: mod_base = OTHER; note = 2'-O-Methyl-guanosine
  modified_base 88: mod_base = OTHER; note = 2'-O-Methyl-adenosine
  modified_base 89: mod_base = OTHER; note = 2'-O-Methyl-guanosine
  modified_base 90: mod_base = OTHER; note = 2'-O-Methyl-uridine
  modified_base 91: mod_base = OTHER; note = 2'-O-Methyl-cytidine
  modified_base 92: mod_base = OTHER; note = 2'-O-Methyl-guanosine
  modified_base 93: mod_base = OTHER; note = 2'-O-Methyl-guanosine
  modified_base 94: mod_base = OTHER; note = 2'-O-Methyl-uridine
  modified_base 95: mod_base = OTHER; note = 2'-O-Methyl-guanosine
  modified_base 96: mod_base = OTHER; note = 2'-O-Methyl-cytidine
  modified_base 97: mod_base = OTHER; note = 2'-O-Methyl-uridine phosphorothioate
  modified_base 98: mod_base = OTHER; note = 2'-O-Methyl-uridine phosphorothioate
  modified_base 99: mod_base = OTHER; note = 2'-O-Methyl-uridine phosphorothioate
  modified_base 100: mod_base = OTHER; note = 2'-O-Methyl-uridine

SEQ ID NO: 3111 - RNA, 100 nt, synthetic construct; identical to SEQ ID NO: 1911
  source 1..100: mol_type = other RNA
  modified_base 1: mod_base = OTHER; note = 2'-O-Methyl-cytidine phosphorothioate
  modified_base 2: mod_base = OTHER; note = 2'-O-Methyl-adenosine phosphorothioate
  modified_base 3: mod_base = OTHER; note = 2'-O-Methyl-guanosine phosphorothioate
  modified_base 9: mod_base = OTHER; note = ribonebularine
  modified_base 21: mod_base = OTHER; note = 2'-O-Methyl-guanosine
  modified_base 28: mod_base = OTHER; note = 2'-O-Methyl-adenosine
  modified_base 29: mod_base = OTHER; note = 2'-O-Methyl-guanosine
  modified_base 30: mod_base = OTHER; note = 2'-O-Methyl-cytidine
  modified_base 31: mod_base = OTHER; note = 2'-O-Methyl-uridine
  modified_base 32: mod_base = OTHER; note = 2'-O-Methyl-adenosine
  modified_base 33: mod_base = OTHER; note = 2'-O-Methyl-guanosine
  modified_base 34: mod_base = OTHER; note = 2'-O-Methyl-adenosine
  modified_base 35: mod_base = OTHER; note = 2'-O-Methyl-adenosine
  modified_base 36: mod_base = OTHER; note = 2'-O-Methyl-adenosine
  modified_base 37: mod_base = OTHER; note = 2'-O-Methyl-uridine
  modified_base 38: mod_base = OTHER; note = 2'-O-Methyl-adenosine
  modified_base 39: mod_base = OTHER; note = 2'-O-Methyl-guanosine
  modified_base 40: mod_base = OTHER; note = 2'-O-Methyl-cytidine
  modified_base 41: mod_base = OTHER; note = 2'-O-Methyl-adenosine
  modified_base 42: mod_base = OTHER; note = 2'-O-Methyl-adenosine
  modified_base 46: mod_base = OTHER; note = 2'-O-Methyl-adenosine
  modified_base 48: mod_base = OTHER; note = 2'-O-Methyl-adenosine
  modified_base 50: mod_base = OTHER; note = 2'-O-Methyl-uridine
  modified_base 52: mod_base = OTHER; note = 2'-O-Methyl-adenosine
  modified_base 53: mod_base = OTHER; note = 2'-O-Methyl-guanosine
  modified_base 54: mod_base = OTHER; note = 2'-O-Methyl-guanosine
  modified_base 55: mod_base = OTHER; note = 2'-O-Methyl-cytidine
  modified_base 56: mod_base = OTHER; note = 2'-O-Methyl-uridine
  modified_base 57: mod_base = OTHER; note = 2'-O-methylnebularine
  modified_base 60: mod_base = OTHER; note = 2'-O-Methyl-cytidine
  modified_base 61: mod_base = OTHER; note = 2'-O-Methyl-cytidine
  modified_base 66: mod_base = OTHER; note = 2'-O-Methyl-uridine
  modified_base 67: mod_base = OTHER; note = 2'-O-Methyl-cytidine
  modified_base 70: mod_base = OTHER; note = 2'-O-Methyl-cytidine
  modified_base 71: mod_base = OTHER; note = 2'-O-Methyl-uridine
  modified_base 72: mod_base = OTHER; note = 2'-O-Methyl-uridine
  modified_base 73: mod_base = OTHER; note = 2'-O-Methyl-guanosine
  modified_base 74: mod_base = OTHER; note = 2'-O-Methyl-adenosine
  modified_base 75: mod_base = OTHER; note = 2'-O-Methyl-adenosine
  modified_base 76: mod_base = OTHER; note = 2'-O-Methyl-adenosine
  modified_base 77: mod_base = OTHER; note = 2'-O-Methyl-adenosine
  modified_base 78: mod_base = OTHER; note = 2'-O-Methyl-adenosine
  modified_base 79: mod_base = OTHER; note = 2'-O-Methyl-guanosine
  modified_base 80: mod_base = OTHER; note = 2'-O-Methyl-uridine
  modified_base 81: mod_base = OTHER; note = 2'-O-Methyl-guanosine
  modified_base 83: mod_base = OTHER; note = 2'-O-Methyl-cytidine
  modified_base 84: mod_base = OTHER; note = 2'-O-Methyl-adenosine
  modified_base 85: mod_base = OTHER; note = 2'-O-Methyl-cytidine
  modified_base 86: mod_base = OTHER; note = 2'-O-Methyl-cytidine
  modified_base 87: mod_base = OTHER; note = 2'-O-Methyl-guanosine
  modified_base 88: mod_base = OTHER; note = 2'-O-Methyl-adenosine
  modified_base 89: mod_base = OTHER; note = 2'-O-Methyl-guanosine
  modified_base 90: mod_base = OTHER; note = 2'-O-Methyl-uridine
  modified_base 91: mod_base = OTHER; note = 2'-O-Methyl-cytidine
  modified_base 92: mod_base = OTHER; note = 2'-O-Methyl-guanosine
  modified_base 93: mod_base = OTHER; note = 2'-O-Methyl-guanosine
  modified_base 94: mod_base = OTHER; note = 2'-O-Methyl-uridine
  modified_base 95: mod_base = OTHER; note = 2'-O-Methyl-guanosine
  modified_base 96: mod_base = OTHER; note = 2'-O-Methyl-cytidine
  modified_base 97: mod_base = OTHER; note = 2'-O-Methyl-uridine phosphorothioate
  modified_base 98: mod_base = OTHER; note = 2'-O-Methyl-uridine phosphorothioate
  modified_base 99: mod_base = OTHER; note = 2'-O-Methyl-uridine phosphorothioate
  modified_base 100: mod_base = OTHER; note = 2'-O-Methyl-uridine

SEQ ID NO: 3112 - RNA, 100 nt, synthetic construct; identical to SEQ ID NO: 1905
  source 1..100: mol_type = other RNA
  modified_base 1: mod_base = OTHER; note = 2'-O-Methyl-cytidine phosphorothioate
  modified_base 2: mod_base = OTHER; note = 2'-O-Methyl-adenosine phosphorothioate
  modified_base 3: mod_base = OTHER; note = 2'-O-Methyl-guanosine
  modified_base 9: mod_base = OTHER; note = ribonebularine
  modified_base 14: mod_base = OTHER; note = ribonebularine
  modified_base 21: mod_base = OTHER; note = 2'-O-Methyl-guanosine
  modified_base 28: mod_base = OTHER; note = 2'-O-Methyl-adenosine
  modified_base 29: mod_base = OTHER; note = 2'-O-Methyl-guanosine
  modified_base 30: mod_base = OTHER; note = 2'-O-Methyl-cytidine
  modified_base 31: mod_base = OTHER; note = 2'-O-Methyl-uridine
  modified_base 32: mod_base = OTHER; note = 2'-O-Methyl-adenosine
  modified_base 33: mod_base = OTHER; note = 2'-O-Methyl-guanosine
  modified_base 34: mod_base = OTHER; note = 2'-O-methylnebularine
  modified_base 35: mod_base = OTHER; note = 2'-O-Methyl-adenosine
  modified_base 36: mod_base = OTHER; note = 2'-O-Methyl-adenosine
  modified_base 37: mod_base = OTHER; note = 2'-O-Methyl-uridine
  modified_base 38: mod_base = OTHER; note = 2'-O-Methyl-adenosine
  modified_base 39: mod_base = OTHER; note = 2'-O-Methyl-guanosine
  modified_base 40: mod_base = OTHER; note = 2'-O-Methyl-cytidine
  modified_base 41: mod_base = OTHER; note = 2'-O-Methyl-adenosine
  modified_base 42: mod_base = OTHER; note = 2'-O-Methyl-adenosine
  modified_base 46: mod_base = OTHER; note = 2'-O-Methyl-adenosine
  modified_base 48: mod_base = OTHER; note = 2'-O-Methyl-adenosine
  modified_base 50: mod_base = OTHER; note = 2'-O-Methyl-uridine
  modified_base 52: mod_base = OTHER; note = 2'-O-Methyl-adenosine
  modified_base 53: mod_base = OTHER; note = 2'-O-Methyl-guanosine
  modified_base 54: mod_base = OTHER; note = 2'-O-Methyl-guanosine
  modified_base 55: mod_base = OTHER; note = 2'-O-Methyl-cytidine
  modified_base 56: mod_base = OTHER; note = 2'-O-Methyl-uridine
  modified_base 57: mod_base = OTHER; note = 2'-O-Methyl-adenosine
  modified_base 60: mod_base = OTHER; note = 2'-O-Methyl-cytidine
  modified_base 61: mod_base = OTHER; note = 2'-O-Methyl-cytidine
  modified_base 66: mod_base = OTHER; note = 2'-O-Methyl-uridine
  modified_base 67: mod_base = OTHER; note = 2'-O-Methyl-cytidine
  modified_base 70: mod_base = OTHER; note = 2'-O-Methyl-cytidine
  modified_base 71: mod_base = OTHER; note = 2'-O-Methyl-uridine
  modified_base 72: mod_base = OTHER; note = 2'-O-Methyl-uridine
  modified_base 73: mod_base = OTHER; note = 2'-O-Methyl-guanosine
  modified_base 74: mod_base = OTHER; note = 2'-O-Methyl-adenosine
  modified_base 75: mod_base = OTHER; note = 2'-O-Methyl-adenosine
  modified_base 76: mod_base = OTHER; note = 2'-O-Methyl-adenosine
  modified_base 77: mod_base = OTHER; note = 2'-O-Methyl-adenosine
  modified_base 78: mod_base = OTHER; note = 2'-O-Methyl-adenosine
  modified_base 79: mod_base = OTHER; note = 2'-O-Methyl-guanosine
  modified_base 80: mod_base = OTHER; note = 2'-O-Methyl-uridine
  modified_base 81: mod_base = OTHER; note = 2'-O-Methyl-guanosine
  modified_base 83: mod_base = OTHER; note = 2'-O-Methyl-cytidine
  modified_base 84: mod_base = OTHER; note = 2'-O-Methyl-adenosine
  modified_base 85: mod_base = OTHER; note = 2'-O-Methyl-cytidine
  modified_base 86: mod_base = OTHER; note = 2'-O-Methyl-cytidine
  modified_base 87: mod_base = OTHER; note = 2'-O-Methyl-guanosine
  modified_base 88: mod_base = OTHER; note = 2'-O-Methyl-adenosine
  modified_base 89: mod_base = OTHER; note = 2'-O-Methyl-guanosine
  modified_base 90: mod_base = OTHER; note = 2'-O-Methyl-uridine
  modified_base 91: mod_base = OTHER; note = 2'-O-Methyl-cytidine
  modified_base 92: mod_base = OTHER; note = 2'-O-Methyl-guanosine
  modified_base 93: mod_base = OTHER; note = 2'-O-Methyl-guanosine
  modified_base 94: mod_base = OTHER; note = 2'-O-Methyl-uridine
  modified_base 95: mod_base = OTHER; note = 2'-O-Methyl-guanosine
  modified_base 96: mod_base = OTHER; note = 2'-O-Methyl-cytidine
  modified_base 97: mod_base = OTHER; note = 2'-O-Methyl-uridine phosphorothioate
  modified_base 98: mod_base = OTHER; note = 2'-O-Methyl-uridine phosphorothioate
  modified_base 99: mod_base = OTHER; note = 2'-O-Methyl-uridine phosphorothioate
  modified_base 100: mod_base = OTHER; note = 2'-O-Methyl-uridine

SEQ ID NO: 3113 - RNA, 100 nt, synthetic construct; identical to SEQ ID NO: 1917
  source 1..100: mol_type = other RNA
  modified_base 1: mod_base = OTHER; note = 2'-O-Methyl-cytidine phosphorothioate
  modified_base 2: mod_base = OTHER; note = 2'-O-Methyl-adenosine phosphorothioate
  modified_base 3: mod_base = OTHER; note = 2'-O-Methyl-guanosine
  modified_base 14: mod_base = OTHER; note = ribonebularine
  modified_base 21: mod_base = OTHER; note = 2'-O-Methyl-guanosine
  modified_base 28: mod_base = OTHER; note = 2'-O-Methyl-adenosine
  modified_base 29: mod_base = OTHER; note = 2'-O-Methyl-guanosine
  modified_base 30: mod_base = OTHER; note = 2'-O-Methyl-cytidine
  modified_base 31: mod_base = OTHER; note = 2'-O-Methyl-uridine
  modified_base 32: mod_base = OTHER; note = 2'-O-Methyl-adenosine
  modified_base 33: mod_base = OTHER; note = 2'-O-Methyl-guanosine
  modified_base 34: mod_base = OTHER; note = 2'-O-Methyl-adenosine
  modified_base 35: mod_base = OTHER; note = 2'-O-Methyl-adenosine
  modified_base 36: mod_base = OTHER; note = 2'-O-Methyl-adenosine
  modified_base 37: mod_base = OTHER; note = 2'-O-Methyl-uridine
  modified_base 38: mod_base = OTHER; note = 2'-O-Methyl-adenosine
  modified_base 39: mod_base = OTHER; note = 2'-O-Methyl-guanosine
  modified_base 40: mod_base = OTHER; note = 2'-O-Methyl-cytidine
  modified_base 41: mod_base = OTHER; note = 2'-O-Methyl-adenosine
  modified_base 42: mod_base = OTHER; note = 2'-O-Methyl-adenosine
  modified_base 46: mod_base = OTHER; note = 2'-O-Methyl-adenosine
  modified_base 48: mod_base = OTHER; note = 2'-O-Methyl-adenosine
  modified_base 50: mod_base = OTHER; note = 2'-O-Methyl-uridine
  modified_base 52: mod_base = OTHER; note = 2'-O-Methyl-adenosine
  modified_base 53: mod_base = OTHER; note = 2'-O-Methyl-guanosine
  modified_base 54: mod_base = OTHER; note = 2'-O-Methyl-guanosine
  modified_base 55: mod_base = OTHER; note = 2'-O-Methyl-cytidine
  modified_base 56: mod_base = OTHER; note = 2'-O-Methyl-uridine
  modified_base 57: mod_base = OTHER; note = 2'-O-methylnebularine
  modified_base 60: mod_base = OTHER; note = 2'-O-Methyl-cytidine
  modified_base 61: mod_base = OTHER; note = 2'-O-Methyl-cytidine
  modified_base 66: mod_base = OTHER; note = 2'-O-Methyl-uridine
  modified_base 67: mod_base = OTHER; note = 2'-O-Methyl-cytidine
  modified_base 70: mod_base = OTHER; note = 2'-O-Methyl-cytidine
  modified_base 71: mod_base = OTHER; note = 2'-O-Methyl-uridine
  modified_base 72: mod_base = OTHER; note = 2'-O-Methyl-uridine
  modified_base 73: mod_base = OTHER; note = 2'-O-Methyl-guanosine
  modified_base 74: mod_base = OTHER; note = 2'-O-Methyl-adenosine
  modified_base 75: mod_base = OTHER; note = 2'-O-Methyl-adenosine
  modified_base 76: mod_base = OTHER; note = 2'-O-Methyl-adenosine
  modified_base 77: mod_base = OTHER; note = 2'-O-Methyl-adenosine
  modified_base 78: mod_base = OTHER; note = 2'-O-Methyl-adenosine
  modified_base 79: mod_base = OTHER; note = 2'-O-Methyl-guanosine
  modified_base 80: mod_base = OTHER; note = 2'-O-Methyl-uridine
  modified_base 81: mod_base = OTHER; note = 2'-O-Methyl-guanosine
  modified_base 83: mod_base = OTHER; note = 2'-O-Methyl-cytidine
  modified_base 84: mod_base = OTHER; note = 2'-O-Methyl-adenosine
  modified_base 85: mod_base = OTHER; note = 2'-O-Methyl-cytidine
  modified_base 86: mod_base = OTHER; note = 2'-O-Methyl-cytidine
  modified_base 87: mod_base = OTHER; note = 2'-O-Methyl-guanosine
  modified_base 88: mod_base = OTHER; note = 2'-O-Methyl-adenosine
  modified_base 89: mod_base = OTHER; note = 2'-O-Methyl-guanosine
  modified_base 90: mod_base = OTHER; note = 2'-O-Methyl-uridine
  modified_base 91: mod_base = OTHER; note = 2'-O-Methyl-cytidine
  modified_base 92: mod_base = OTHER; note = 2'-O-Methyl-guanosine
  modified_base 93: mod_base = OTHER; note = 2'-O-Methyl-guanosine
  modified_base 94: mod_base = OTHER; note = 2'-O-Methyl-uridine
  modified_base 95: mod_base = OTHER; note = 2'-O-Methyl-guanosine
  modified_base 96: mod_base = OTHER; note = 2'-O-Methyl-cytidine
  modified_base 97: mod_base = OTHER; note = 2'-O-Methyl-uridine phosphorothioate
  modified_base 98: mod_base = OTHER; note = 2'-O-Methyl-uridine phosphorothioate
  modified_base 99: mod_base = OTHER; note = 2'-O-Methyl-uridine phosphorothioate
  modified_base 100: mod_base = OTHER; note = 2'-O-Methyl-uridine

SEQ ID NO: 3114 - RNA, 100 nt, synthetic construct; identical to SEQ ID NO: 1915
  source 1..100: mol_type = other RNA
  modified_base 1: mod_base = OTHER; note = 2'-O-Methyl-cytidine phosphorothioate
  modified_base 2: mod_base = OTHER; note = 2'-O-Methyl-adenosine phosphorothioate
  modified_base 3: mod_base = OTHER; note = 2'-O-Methyl-guanosine
  modified_base 14: mod_base = OTHER; note = ribonebularine
  modified_base 21: mod_base = OTHER; note = 2'-O-Methyl-guanosine
  modified_base 28: mod_base = OTHER; note = 2'-O-Methyl-adenosine
  modified_base 29: mod_base = OTHER; note = 2'-O-Methyl-guanosine
  modified_base 30: mod_base = OTHER; note = 2'-O-Methyl-cytidine
  modified_base 31: mod_base = OTHER; note = 2'-O-Methyl-uridine
  modified_base 32: mod_base = OTHER; note = 2'-O-Methyl-adenosine
  modified_base 33: mod_base = OTHER; note = 2'-O-Methyl-guanosine
  modified_base 34: mod_base = OTHER; note = 2'-O-methylnebularine
  modified_base 35: mod_base = OTHER; note = 2'-O-Methyl-adenosine
  modified_base 36: mod_base = OTHER; note = 2'-O-Methyl-adenosine
  modified_base 37: mod_base = OTHER; note = 2'-O-Methyl-uridine
  modified_base 38: mod_base = OTHER; note = 2'-O-Methyl-adenosine
  modified_base 39: mod_base = OTHER; note = 2'-O-Methyl-guanosine
  modified_base 40: mod_base = OTHER; note = 2'-O-Methyl-cytidine
  modified_base 41: mod_base = OTHER; note = 2'-O-Methyl-adenosine
  modified_base 42: mod_base = OTHER; note = 2'-O-Methyl-adenosine
  modified_base 46: mod_base = OTHER; note = 2'-O-Methyl-adenosine
  modified_base 48: mod_base = OTHER; note = 2'-O-Methyl-adenosine
  modified_base 50: mod_base = OTHER; note = 2'-O-Methyl-uridine
  modified_base 52: mod_base = OTHER; note = 2'-O-Methyl-adenosine
  modified_base 53: mod_base = OTHER; note = 2'-O-Methyl-guanosine
  modified_base 54: mod_base = OTHER; note = 2'-O-Methyl-guanosine
  modified_base 55: mod_base = OTHER; note = 2'-O-Methyl-cytidine
  modified_base 56: mod_base = OTHER; note = 2'-O-Methyl-uridine
  modified_base 57: mod_base = OTHER; note = 2'-O-Methyl-adenosine
  modified_base 60: mod_base = OTHER; note = 2'-O-Methyl-cytidine
  modified_base 61: mod_base = OTHER; note = 2'-O-Methyl-cytidine
  modified_base 66: mod_base = OTHER; note = 2'-O-Methyl-uridine
  modified_base 67: mod_base = OTHER; note = 2'-O-Methyl-cytidine
  modified_base 70: mod_base = OTHER; note = 2'-O-Methyl-cytidine
  modified_base 71: mod_base = OTHER; note = 2'-O-Methyl-uridine
  modified_base 72: mod_base = OTHER; note = 2'-O-Methyl-uridine
  modified_base 73: mod_base = OTHER; note = 2'-O-Methyl-guanosine
  modified_base 74: mod_base = OTHER; note = 2'-O-Methyl-adenosine
  modified_base 75: mod_base = OTHER; note = 2'-O-Methyl-adenosine
  modified_base 76: mod_base = OTHER; note = 2'-O-Methyl-adenosine
  modified_base 77: mod_base = OTHER; note = 2'-O-Methyl-adenosine
  modified_base 78: mod_base = OTHER; note = 2'-O-Methyl-adenosine
  modified_base 79: mod_base = OTHER; note = 2'-O-Methyl-guanosine
  modified_base 80: mod_base = OTHER; note = 2'-O-Methyl-uridine
  modified_base 81: mod_base = OTHER; note = 2'-O-Methyl-guanosine
  modified_base 83: mod_base = OTHER; note = 2'-O-Methyl-cytidine
  modified_base 84: mod_base = OTHER; note = 2'-O-Methyl-adenosine
  modified_base 85: mod_base = OTHER; note = 2'-O-Methyl-cytidine
  modified_base 86: mod_base = OTHER; note = 2'-O-Methyl-cytidine
  modified_base 87: mod_base = OTHER; note = 2'-O-Methyl-guanosine
  modified_base 88: mod_base = OTHER; note = 2'-O-Methyl-adenosine
  modified_base 89: mod_base = OTHER; note = 2'-O-Methyl-guanosine
  modified_base 90: mod_base = OTHER; note = 2'-O-Methyl-uridine
  modified_base 91: mod_base = OTHER; note = 2'-O-Methyl-cytidine
  modified_base 92: mod_base = OTHER; note = 2'-O-Methyl-guanosine
  modified_base 93: mod_base = OTHER; note = 2'-O-Methyl-guanosine
  modified_base 94: mod_base = OTHER; note = 2'-O-Methyl-uridine
  modified_base 95: mod_base = OTHER; note = 2'-O-Methyl-guanosine
  modified_base 96: mod_base = OTHER; note = 2'-O-Methyl-cytidine
  modified_base 97: mod_base = OTHER; note = 2'-O-Methyl-uridine phosphorothioate
  modified_base 98: mod_base = OTHER; note = 2'-O-Methyl-uridine phosphorothioate
  modified_base 99: mod_base = OTHER; note = 2'-O-Methyl-uridine phosphorothioate
  modified_base 100: mod_base = OTHER; note = 2'-O-Methyl-uridine

SEQ ID NO: 3115 - RNA, 100 nt, synthetic construct; identical to SEQ ID NO: 1911
  source 1..100: mol_type = other RNA
  modified_base 1: mod_base = OTHER; note = 2'-O-Methyl-cytidine phosphorothioate
  modified_base 2: mod_base = OTHER; note = 2'-O-Methyl-adenosine phosphorothioate
  modified_base 3: mod_base = OTHER; note = 2'-O-Methyl-guanosine
  modified_base 9: mod_base = OTHER; note = ribonebularine
  modified_base 21: mod_base = OTHER; note = 2'-O-Methyl-guanosine
  modified_base 28: mod_base = OTHER; note = 2'-O-Methyl-adenosine
  modified_base 29: mod_base = OTHER; note = 2'-O-Methyl-guanosine
  modified_base 30: mod_base = OTHER; note = 2'-O-Methyl-cytidine
  modified_base 31: mod_base = OTHER; note = 2'-O-Methyl-uridine
  modified_base 32: mod_base = OTHER; note = 2'-O-Methyl-adenosine
  modified_base 33: mod_base = OTHER; note = 2'-O-Methyl-guanosine
  modified_base 34: mod_base = OTHER; note = 2'-O-Methyl-adenosine
  modified_base 35: mod_base = OTHER; note = 2'-O-Methyl-adenosine
  modified_base 36: mod_base = OTHER; note = 2'-O-Methyl-adenosine
  modified_base 37: mod_base = OTHER; note = 2'-O-Methyl-uridine
  modified_base 38: mod_base = OTHER; note = 2'-O-Methyl-adenosine
  modified_base 39: mod_base = OTHER; note = 2'-O-Methyl-guanosine
  modified_base 40: mod_base = OTHER; note = 2'-O-Methyl-cytidine
  modified_base 41: mod_base = OTHER; note = 2'-O-Methyl-adenosine
  modified_base 42: mod_base = OTHER; note = 2'-O-Methyl-adenosine
  modified_base 46: mod_base = OTHER; note = 2'-O-Methyl-adenosine
  modified_base 48: mod_base = OTHER; note = 2'-O-Methyl-adenosine
  modified_base 50: mod_base = OTHER; note = 2'-O-Methyl-uridine
  modified_base 52: mod_base = OTHER; note = 2'-O-Methyl-adenosine
  modified_base 53: mod_base = OTHER; note = 2'-O-Methyl-guanosine
  modified_base 54: mod_base = OTHER; note = 2'-O-Methyl-guanosine
  modified_base 55: mod_base = OTHER; note = 2'-O-Methyl-cytidine
  modified_base 56: mod_base = OTHER; note = 2'-O-Methyl-uridine
  modified_base 57: mod_base = OTHER; note = 2'-O-methylnebularine
  modified_base 60: mod_base = OTHER; note = 2'-O-Methyl-cytidine
  modified_base 61: mod_base = OTHER; note = 2'-O-Methyl-cytidine
  modified_base 66: mod_base = OTHER; note = 2'-O-Methyl-uridine
  modified_base 67: mod_base = OTHER; note = 2'-O-Methyl-cytidine
  modified_base 70: mod_base = OTHER; note = 2'-O-Methyl-cytidine
  modified_base 71: mod_base = OTHER; note = 2'-O-Methyl-uridine
  modified_base 72: mod_base = OTHER; note = 2'-O-Methyl-uridine
  modified_base 73: mod_base = OTHER; note = 2'-O-Methyl-guanosine
  modified_base 74: mod_base = OTHER; note = 2'-O-Methyl-adenosine
  modified_base 75: mod_base = OTHER; note = 2'-O-Methyl-adenosine
  modified_base 76: mod_base = OTHER; note = 2'-O-Methyl-adenosine
  modified_base 77: mod_base = OTHER; note = 2'-O-Methyl-adenosine
  modified_base 78: mod_base = OTHER; note = 2'-O-Methyl-adenosine
  modified_base 79: mod_base = OTHER; note = 2'-O-Methyl-guanosine
  modified_base 80: mod_base = OTHER; note = 2'-O-Methyl-uridine
  modified_base 81: mod_base = OTHER; note = 2'-O-Methyl-guanosine
  modified_base 83: mod_base = OTHER; note = 2'-O-Methyl-cytidine
  modified_base 84: mod_base = OTHER; note = 2'-O-Methyl-adenosine
  modified_base 85: mod_base = OTHER; note = 2'-O-Methyl-cytidine
  modified_base 86: mod_base = OTHER; note = 2'-O-Methyl-cytidine
  modified_base 87: mod_base = OTHER; note = 2'-O-Methyl-guanosine
  modified_base 88: mod_base = OTHER; note = 2'-O-Methyl-adenosine
  modified_base 89: mod_base = OTHER; note = 2'-O-Methyl-guanosine
  modified_base 90: mod_base = OTHER; note = 2'-O-Methyl-uridine
  modified_base 91: mod_base = OTHER; note = 2'-O-Methyl-cytidine
  modified_base 92: mod_base = OTHER; note = 2'-O-Methyl-guanosine
  modified_base 93: mod_base = OTHER; note = 2'-O-Methyl-guanosine
  modified_base 94: mod_base = OTHER; note = 2'-O-Methyl-uridine
  modified_base 95: mod_base = OTHER; note = 2'-O-Methyl-guanosine
  modified_base 96: mod_base = OTHER; note = 2'-O-Methyl-cytidine
  modified_base 97: mod_base = OTHER; note = 2'-O-Methyl-uridine phosphorothioate
  modified_base 98: mod_base = OTHER; note = 2'-O-Methyl-uridine phosphorothioate
  modified_base 99: mod_base = OTHER; note = 2'-O-Methyl-uridine phosphorothioate
  modified_base 100: mod_base = OTHER; note = 2'-O-Methyl-uridine

SEQ ID NO: 3116 - RNA, 100 nt, synthetic construct; identical to SEQ ID NO: 1905
  source 1..100: mol_type = other RNA
  modified_base 1: mod_base = OTHER; note = 2'-O-Methyl-cytidine phosphorothioate
  modified_base 2: mod_base = OTHER; note = 2'-O-Methyl-adenosine phosphorothioate
  modified_base 3: mod_base = OTHER; note = 2'-O-Methyl-guanosine phosphorothioate
  modified_base 9: mod_base = OTHER; note = ribonebularine
  modified_base 14: mod_base = OTHER; note = ribonebularine
  modified_base 21: mod_base = OTHER; note = 2'-O-Methyl-guanosine
  modified_base 28: mod_base = OTHER; note = 2'-O-Methyl-adenosine
  modified_base 29: mod_base = OTHER; note = 2'-O-Methyl-guanosine
  modified_base 30: mod_base = OTHER; note = 2'-O-Methyl-cytidine
  modified_base 31: mod_base = OTHER; note = 2'-O-Methyl-uridine
  modified_base 32: mod_base = OTHER; note = 2'-O-Methyl-adenosine
  modified_base 33: mod_base = OTHER; note = 2'-O-Methyl-guanosine
  modified_base 34: mod_base = OTHER; note = 2'-O-methylnebularine
  modified_base 35: mod_base = OTHER; note = 2'-O-Methyl-adenosine
  modified_base 36: mod_base = OTHER; note = 2'-O-Methyl-adenosine
  modified_base 37: mod_base = OTHER; note = 2'-O-Methyl-uridine
  modified_base 38: mod_base = OTHER; note = 2'-O-Methyl-adenosine
  modified_base 39: mod_base = OTHER; note = 2'-O-Methyl-guanosine
  modified_base 40: mod_base = OTHER; note = 2'-O-Methyl-cytidine
  modified_base 41: mod_base = OTHER; note = 2'-O-Methyl-adenosine
  modified_base 42: mod_base = OTHER; note = 2'-O-Methyl-adenosine
  modified_base 46: mod_base = OTHER; note = 2'-O-Methyl-adenosine
  modified_base 48: mod_base = OTHER; note = 2'-O-Methyl-adenosine
  modified_base 50: mod_base = OTHER; note = 2'-O-Methyl-uridine
  modified_base 52: mod_base = OTHER; note = 2'-O-Methyl-adenosine
  modified_base 53: mod_base = OTHER; note = 2'-O-Methyl-guanosine
  modified_base 54: mod_base = OTHER; note = 2'-O-Methyl-guanosine
  modified_base 55: mod_base = OTHER; note = 2'-O-Methyl-cytidine
  modified_base 56: mod_base = OTHER; note = 2'-O-Methyl-uridine
  modified_base 57: mod_base = OTHER; note = 2'-O-Methyl-adenosine
  modified_base 60: mod_base = OTHER; note = 2'-O-Methyl-cytidine
  modified_base 61: mod_base = OTHER; note = 2'-O-Methyl-cytidine
  modified_base 66: mod_base = OTHER; note = 2'-O-Methyl-uridine
  modified_base 67: mod_base = OTHER; note = 2'-O-Methyl-cytidine
  modified_base 70: mod_base = OTHER; note = 2'-O-Methyl-cytidine
  modified_base 71: mod_base = OTHER; note = 2'-O-Methyl-uridine
  modified_base 72: mod_base = OTHER; note = 2'-O-Methyl-uridine
  modified_base 73: mod_base = OTHER; note = 2'-O-Methyl-guanosine
  modified_base 74: mod_base = OTHER; note = 2'-O-Methyl-adenosine
  modified_base 75: mod_base = OTHER; note = 2'-O-Methyl-adenosine
  modified_base 76: mod_base = OTHER; note = 2'-O-Methyl-adenosine
  modified_base 77: mod_base = OTHER; note = 2'-O-Methyl-adenosine
  modified_base 78: mod_base = OTHER; note = 2'-O-Methyl-adenosine
  modified_base 79: mod_base = OTHER; note = 2'-O-Methyl-guanosine
  modified_base 80: mod_base = OTHER; note = 2'-O-Methyl-uridine
  modified_base 81: mod_base = OTHER; note = 2'-O-Methyl-guanosine
  modified_base 83: mod_base = OTHER; note = 2'-O-Methyl-cytidine
  modified_base 84: mod_base = OTHER; note = 2'-O-Methyl-adenosine
  modified_base 85: mod_base = OTHER; note = 2'-O-Methyl-cytidine
  modified_base 86: mod_base = OTHER; note = 2'-O-Methyl-cytidine
  modified_base 87: mod_base = OTHER; note = 2'-O-Methyl-guanosine
  modified_base 88: mod_base = OTHER; note = 2'-O-Methyl-adenosine
  modified_base 89: mod_base = OTHER; note = 2'-O-Methyl-guanosine
  modified_base 90: mod_base = OTHER; note = 2'-O-Methyl-uridine
  modified_base 91: mod_base = OTHER; note = 2'-O-Methyl-cytidine
  modified_base 92: mod_base = OTHER; note = 2'-O-Methyl-guanosine
  modified_base 93: mod_base = OTHER; note = 2'-O-Methyl-guanosine
  modified_base 94: mod_base = OTHER; note = 2'-O-Methyl-uridine
  modified_base 95: mod_base = OTHER; note = 2'-O-Methyl-guanosine
  modified_base 96: mod_base = OTHER; note = 2'-O-Methyl-cytidine
  modified_base 97: mod_base = OTHER; note = 2'-O-Methyl-uridine
  modified_base 98: mod_base = OTHER; note = 2'-O-Methyl-uridine phosphorothioate
  modified_base 99: mod_base = OTHER; note = 2'-O-Methyl-uridine phosphorothioate
  modified_base 100: mod_base = OTHER; note = 2'-O-Methyl-uridine

SEQ ID NO: 3117 - RNA, 100 nt, synthetic construct; identical to SEQ ID NO: 1917
  source 1..100: mol_type = other RNA
  modified_base 1: mod_base = OTHER; note = 2'-O-Methyl-cytidine phosphorothioate
  modified_base 2: mod_base = OTHER; note = 2'-O-Methyl-adenosine phosphorothioate
  modified_base 3: mod_base = OTHER; note = 2'-O-Methyl-guanosine phosphorothioate
  modified_base 14: mod_base = OTHER; note = ribonebularine
  modified_base 21: mod_base = OTHER; note = 2'-O-Methyl-guanosine
  modified_base 28: mod_base = OTHER; note = 2'-O-Methyl-adenosine
  modified_base 29: mod_base = OTHER; note = 2'-O-Methyl-guanosine
  modified_base 30: mod_base = OTHER; note = 2'-O-Methyl-cytidine
  modified_base 31: mod_base = OTHER; note = 2'-O-Methyl-uridine
  modified_base 32: mod_base = OTHER; note = 2'-O-Methyl-adenosine
  modified_base 33: mod_base = OTHER; note = 2'-O-Methyl-guanosine
  modified_base 34: mod_base = OTHER; note = 2'-O-Methyl-adenosine
  modified_base 35: mod_base = OTHER; note = 2'-O-Methyl-adenosine
  modified_base 36: mod_base = OTHER; note = 2'-O-Methyl-adenosine
  modified_base 37: mod_base = OTHER; note = 2'-O-Methyl-uridine
  modified_base 38: mod_base = OTHER; note = 2'-O-Methyl-adenosine
  modified_base 39: mod_base = OTHER; note = 2'-O-Methyl-guanosine
  modified_base 40: mod_base = OTHER; note = 2'-O-Methyl-cytidine
  modified_base 41: mod_base = OTHER; note = 2'-O-Methyl-adenosine
  modified_base 42: mod_base = OTHER; note = 2'-O-Methyl-adenosine
  modified_base 46: mod_base = OTHER; note = 2'-O-Methyl-adenosine
  modified_base 48: mod_base = OTHER; note = 2'-O-Methyl-adenosine
  modified_base 50: mod_base = OTHER; note = 2'-O-Methyl-uridine
  modified_base 52: mod_base = OTHER; note = 2'-O-Methyl-adenosine
  modified_base 53: mod_base = OTHER; note = 2'-O-Methyl-guanosine
  modified_base 54: mod_base = OTHER; note = 2'-O-Methyl-guanosine
  modified_base 55: mod_base = OTHER; note = 2'-O-Methyl-cytidine
  modified_base 56: mod_base = OTHER; note = 2'-O-Methyl-uridine
  modified_base 57: mod_base = OTHER; note = 2'-O-methylnebularine
  modified_base 60: mod_base = OTHER; note = 2'-O-Methyl-cytidine
  modified_base 61: mod_base = OTHER; note = 2'-O-Methyl-cytidine
  modified_base 66: mod_base = OTHER; note = 2'-O-Methyl-uridine
  modified_base 67: mod_base = OTHER; note = 2'-O-Methyl-cytidine
  modified_base 70: mod_base = OTHER; note = 2'-O-Methyl-cytidine
  modified_base 71: mod_base = OTHER; note = 2'-O-Methyl-uridine
  modified_base 72: mod_base = OTHER; note = 2'-O-Methyl-uridine
  modified_base 73: mod_base = OTHER; note = 2'-O-Methyl-guanosine
  modified_base 74: mod_base = OTHER; note = 2'-O-Methyl-adenosine
  modified_base 75: mod_base = OTHER; note = 2'-O-Methyl-adenosine
  modified_base 76: mod_base = OTHER; note = 2'-O-Methyl-adenosine
  modified_base 77: mod_base = OTHER; note = 2'-O-Methyl-adenosine
  modified_base 78: mod_base = OTHER; note = 2'-O-Methyl-adenosine
  modified_base 79: mod_base = OTHER; note = 2'-O-Methyl-guanosine
  modified_base 80: mod_base = OTHER; note = 2'-O-Methyl-uridine
  modified_base 81: mod_base = OTHER; note = 2'-O-Methyl-guanosine
  modified_base 83: mod_base = OTHER; note = 2'-O-Methyl-cytidine
  modified_base 84: mod_base = OTHER; note = 2'-O-Methyl-adenosine
  modified_base 85: mod_base = OTHER; note = 2'-O-Methyl-cytidine
  modified_base 86: mod_base = OTHER; note = 2'-O-Methyl-cytidine
  modified_base 87: mod_base = OTHER; note = 2'-O-Methyl-guanosine
  modified_base 88: mod_base = OTHER; note = 2'-O-Methyl-adenosine
  modified_base 89: mod_base = OTHER; note = 2'-O-Methyl-guanosine
  modified_base 90: mod_base = OTHER; note = 2'-O-Methyl-uridine
  modified_base 91: mod_base = OTHER; note = 2'-O-Methyl-cytidine
  modified_base 92: mod_base = OTHER; note = 2'-O-Methyl-guanosine
  modified_base 93: mod_base = OTHER; note = 2'-O-Methyl-guanosine
  modified_base 94: mod_base = OTHER; note = 2'-O-Methyl-uridine
  modified_base 95: mod_base = OTHER; note = 2'-O-Methyl-guanosine
  modified_base 96: mod_base = OTHER; note = 2'-O-Methyl-cytidine
  modified_base 97: mod_base = OTHER; note = 2'-O-Methyl-uridine
  modified_base 98: mod_base = OTHER; note = 2'-O-Methyl-uridine phosphorothioate
  modified_base 99: mod_base = OTHER; note = 2'-O-Methyl-uridine phosphorothioate
  modified_base 100: mod_base = OTHER; note = 2'-O-Methyl-uridine

SEQ ID NO: 3118 - RNA, 100 nt, synthetic construct; identical to SEQ ID NO: 1915
  source 1..100: mol_type = other RNA
  modified_base 1: mod_base = OTHER; note = 2'-O-Methyl-cytidine phosphorothioate
  modified_base 2: mod_base = OTHER; note = 2'-O-Methyl-adenosine phosphorothioate
  modified_base 3: mod_base = OTHER; note = 2'-O-Methyl-guanosine phosphorothioate
  modified_base 14: mod_base = OTHER; note = ribonebularine
  modified_base 21: mod_base = OTHER; note = 2'-O-Methyl-guanosine
  modified_base 28: mod_base = OTHER; note = 2'-O-Methyl-adenosine
  modified_base 29: mod_base = OTHER; note = 2'-O-Methyl-guanosine
  modified_base 30: mod_base = OTHER; note = 2'-O-Methyl-cytidine
  modified_base 31: mod_base = OTHER; note = 2'-O-Methyl-uridine
  modified_base 32: mod_base = OTHER; note = 2'-O-Methyl-adenosine
  modified_base 33: mod_base = OTHER; note = 2'-O-Methyl-guanosine
  modified_base 34: mod_base = OTHER; note = 2'-O-methylnebularine
  modified_base 35: mod_base = OTHER; note = 2'-O-Methyl-adenosine
  modified_base 36: mod_base = OTHER; note = 2'-O-Methyl-adenosine
  modified_base 37: mod_base = OTHER; note = 2'-O-Methyl-uridine
  modified_base 38: mod_base = OTHER; note = 2'-O-Methyl-adenosine
  modified_base 39: mod_base = OTHER; note = 2'-O-Methyl-guanosine
  modified_base 40: mod_base = OTHER; note = 2'-O-Methyl-cytidine
  modified_base 41: mod_base = OTHER; note = 2'-O-Methyl-adenosine
  modified_base 42: mod_base = OTHER; note = 2'-O-Methyl-adenosine
  modified_base 46: mod_base = OTHER; note = 2'-O-Methyl-adenosine
  modified_base 48: mod_base = OTHER; note = 2'-O-Methyl-adenosine
  modified_base 50: mod_base = OTHER; note = 2'-O-Methyl-uridine
  modified_base 52: mod_base = OTHER; note = 2'-O-Methyl-adenosine
  modified_base 53: mod_base = OTHER; note = 2'-O-Methyl-guanosine
  modified_base 54: mod_base = OTHER; note = 2'-O-Methyl-guanosine
  modified_base 55: mod_base = OTHER; note = 2'-O-Methyl-cytidine
  modified_base 56: mod_base = OTHER; note = 2'-O-Methyl-uridine
  modified_base 57: mod_base = OTHER; note = 2'-O-Methyl-adenosine
  modified_base 60: mod_base = OTHER; note = 2'-O-Methyl-cytidine
  modified_base 61: mod_base = OTHER; note = 2'-O-Methyl-cytidine
  modified_base 66: mod_base = OTHER; note = 2'-O-Methyl-uridine
  modified_base 67: mod_base = OTHER; note = 2'-O-Methyl-cytidine
  modified_base 70: mod_base = OTHER; note = 2'-O-Methyl-cytidine
  modified_base 71: mod_base = OTHER; note = 2'-O-Methyl-uridine
  modified_base 72: mod_base = OTHER; note = 2'-O-Methyl-uridine
  modified_base 73: mod_base = OTHER; note = 2'-O-Methyl-guanosine
  modified_base 74: mod_base = OTHER; note = 2'-O-Methyl-adenosine
  modified_base 75: mod_base = OTHER; note = 2'-O-Methyl-adenosine
  modified_base 76: mod_base = OTHER; note = 2'-O-Methyl-adenosine
  modified_base 77: mod_base = OTHER; note = 2'-O-Methyl-adenosine
  modified_base 78: mod_base = OTHER; note = 2'-O-Methyl-adenosine
  modified_base 79: mod_base = OTHER; note = 2'-O-Methyl-guanosine
  modified_base 80: mod_base = OTHER; note = 2'-O-Methyl-uridine
  modified_base 81: mod_base = OTHER; note = 2'-O-Methyl-guanosine
  modified_base 83: mod_base = OTHER; note = 2'-O-Methyl-cytidine
  modified_base 84: mod_base = OTHER; note = 2'-O-Methyl-adenosine
  modified_base 85: mod_base = OTHER; note = 2'-O-Methyl-cytidine
  modified_base 86: mod_base = OTHER; note = 2'-O-Methyl-cytidine
  modified_base 87: mod_base = OTHER; note = 2'-O-Methyl-guanosine
  modified_base 88: mod_base = OTHER; note = 2'-O-Methyl-adenosine
  modified_base 89: mod_base = OTHER; note = 2'-O-Methyl-guanosine
  modified_base 90: mod_base = OTHER; note = 2'-O-Methyl-uridine
  modified_base 91: mod_base = OTHER; note = 2'-O-Methyl-cytidine
  modified_base 92: mod_base = OTHER; note = 2'-O-Methyl-guanosine
  modified_base 93: mod_base = OTHER; note = 2'-O-Methyl-guanosine
  modified_base 94: mod_base = OTHER; note = 2'-O-Methyl-uridine
  modified_base 95: mod_base = OTHER; note = 2'-O-Methyl-guanosine
  modified_base 96: mod_base = OTHER; note = 2'-O-Methyl-cytidine
  modified_base 97: mod_base = OTHER; note = 2'-O-Methyl-uridine
  modified_base 98: mod_base = OTHER; note = 2'-O-Methyl-uridine phosphorothioate
  modified_base 99: mod_base = OTHER; note = 2'-O-Methyl-uridine phosphorothioate
  modified_base 100: mod_base = OTHER; note = 2'-O-Methyl-uridine

SEQ ID NO: 3119 - RNA, 100 nt, synthetic construct; identical to SEQ ID NO: 1911
  source 1..100: mol_type = other RNA
  modified_base 1: mod_base = OTHER; note = 2'-O-Methyl-cytidine phosphorothioate
  modified_base 2: mod_base = OTHER; note = 2'-O-Methyl-adenosine phosphorothioate
  modified_base 3: mod_base = OTHER; note = 2'-O-Methyl-guanosine phosphorothioate
  modified_base 9: mod_base = OTHER; note = ribonebularine
  modified_base 21: mod_base = OTHER; note = 2'-O-Methyl-guanosine
  modified_base 28: mod_base = OTHER; note = 2'-O-Methyl-adenosine
  modified_base 29: mod_base = OTHER; note = 2'-O-Methyl-guanosine
  modified_base 30: mod_base = OTHER; note = 2'-O-Methyl-cytidine
  modified_base 31: mod_base = OTHER; note = 2'-O-Methyl-uridine
  modified_base 32: mod_base = OTHER; note = 2'-O-Methyl-adenosine
  modified_base 33: mod_base = OTHER; note = 2'-O-Methyl-guanosine
  modified_base 34: mod_base = OTHER; note = 2'-O-Methyl-adenosine
  modified_base 35: mod_base = OTHER; note = 2'-O-Methyl-adenosine
  modified_base 36: mod_base = OTHER; note = 2'-O-Methyl-adenosine
  modified_base 37: mod_base = OTHER; note = 2'-O-Methyl-uridine
  modified_base 38: mod_base = OTHER; note = 2'-O-Methyl-adenosine
  modified_base 39: mod_base = OTHER; note = 2'-O-Methyl-guanosine
  modified_base 40: mod_base = OTHER; note = 2'-O-Methyl-cytidine
  modified_base 41: mod_base = OTHER; note = 2'-O-Methyl-adenosine
  modified_base 42: mod_base = OTHER; note = 2'-O-Methyl-adenosine
  modified_base 46: mod_base = OTHER; note = 2'-O-Methyl-adenosine
  modified_base 48: mod_base = OTHER; note = 2'-O-Methyl-adenosine
  modified_base 50: mod_base = OTHER; note = 2'-O-Methyl-uridine
  modified_base 52: mod_base = OTHER; note = 2'-O-Methyl-adenosine
  modified_base 53: mod_base = OTHER; note = 2'-O-Methyl-guanosine
  modified_base 54: mod_base = OTHER; note = 2'-O-Methyl-guanosine
  modified_base 55: mod_base = OTHER; note = 2'-O-Methyl-cytidine
  modified_base 56: mod_base = OTHER; note = 2'-O-Methyl-uridine
  modified_base 57: mod_base = OTHER; note = 2'-O-methylnebularine
  modified_base 60: mod_base = OTHER; note = 2'-O-Methyl-cytidine
  modified_base 61: mod_base = OTHER; note = 2'-O-Methyl-cytidine
  modified_base 66: mod_base = OTHER; note = 2'-O-Methyl-uridine
  modified_base 67: mod_base = OTHER; note = 2'-O-Methyl-cytidine
  modified_base 70: mod_base = OTHER; note = 2'-O-Methyl-cytidine
  modified_base 71: mod_base = OTHER; note = 2'-O-Methyl-uridine
  modified_base 72: mod_base = OTHER; note = 2'-O-Methyl-uridine
  modified_base 73: mod_base = OTHER; note = 2'-O-Methyl-guanosine
  modified_base 74: mod_base = OTHER; note = 2'-O-Methyl-adenosine
  modified_base 75: mod_base = OTHER; note = 2'-O-Methyl-adenosine
  modified_base 76: mod_base = OTHER; note = 2'-O-Methyl-adenosine
  modified_base 77: mod_base = OTHER; note = 2'-O-Methyl-adenosine
  modified_base 78: mod_base = OTHER; note = 2'-O-Methyl-adenosine
  modified_base 79: mod_base = OTHER; note = 2'-O-Methyl-guanosine
  modified_base 80: mod_base = OTHER; note = 2'-O-Methyl-uridine
  modified_base 81: mod_base = OTHER; note = 2'-O-Methyl-guanosine
  modified_base 83: mod_base = OTHER; note = 2'-O-Methyl-cytidine
  modified_base 84: mod_base = OTHER; note = 2'-O-Methyl-adenosine
  modified_base 85: mod_base = OTHER; note = 2'-O-Methyl-cytidine
  modified_base 86: mod_base = OTHER; note = 2'-O-Methyl-cytidine
  modified_base 87: mod_base = OTHER; note = 2'-O-Methyl-guanosine
  modified_base 88: mod_base = OTHER; note = 2'-O-Methyl-adenosine
  modified_base 89: mod_base = OTHER; note = 2'-O-Methyl-guanosine
  modified_base 90: mod_base = OTHER; note = 2'-O-Methyl-uridine
  modified_base 91: mod_base = OTHER; note = 2'-O-Methyl-cytidine
  modified_base 92: mod_base = OTHER; note = 2'-O-Methyl-guanosine
  modified_base 93: mod_base = OTHER; note = 2'-O-Methyl-guanosine
  modified_base 94: mod_base = OTHER; note = 2'-O-Methyl-uridine
  modified_base 95: mod_base = OTHER; note = 2'-O-Methyl-guanosine
  modified_base 96: mod_base = OTHER; note = 2'-O-Methyl-cytidine
  modified_base 97: mod_base = OTHER; note = 2'-O-Methyl-uridine
  modified_base 98: mod_base = OTHER; note = 2'-O-Methyl-uridine phosphorothioate
  modified_base 99: mod_base = OTHER; note = 2'-O-Methyl-uridine phosphorothioate
  modified_base 100: mod_base = OTHER; note = 2'-O-Methyl-uridine

SEQ ID NO: 3120 - RNA, 100 nt, synthetic construct; identical to SEQ ID NO: 1905
  source 1..100: mol_type = other RNA
  modified_base 1: mod_base = OTHER; note = 2'-O-Methyl-cytidine phosphorothioate
  modified_base 2: mod_base = OTHER; note = 2'-O-Methyl-adenosine phosphorothioate
  modified_base 3: mod_base = OTHER; note = 2'-O-Methyl-guanosine
  modified_base 9: mod_base = OTHER; note = ribonebularine
  modified_base 14: mod_base = OTHER; note = ribonebularine
  modified_base 21: mod_base = OTHER; note = 2'-O-Methyl-guanosine
  modified_base 28: mod_base = OTHER; note = 2'-O-Methyl-adenosine
  modified_base 29: mod_base = OTHER; note = 2'-O-Methyl-guanosine
  modified_base 30: mod_base = OTHER; note = 2'-O-Methyl-cytidine
  modified_base 31: mod_base = OTHER; note = 2'-O-Methyl-uridine
  modified_base 32: mod_base = OTHER; note = 2'-O-Methyl-adenosine
  modified_base 33: mod_base = OTHER; note = 2'-O-Methyl-guanosine
  modified_base 34: mod_base = OTHER; note = 2'-O-methylnebularine
  modified_base 35: mod_base = OTHER; note = 2'-O-Methyl-adenosine
  modified_base 36: mod_base = OTHER; note = 2'-O-Methyl-adenosine
  modified_base 37: mod_base = OTHER; note = 2'-O-Methyl-uridine
  modified_base 38: mod_base = OTHER; note = 2'-O-Methyl-adenosine
  modified_base 39: mod_base = OTHER; note = 2'-O-Methyl-guanosine
  modified_base 40: mod_base = OTHER; note = 2'-O-Methyl-cytidine
  modified_base 41: mod_base = OTHER; note = 2'-O-Methyl-adenosine
  modified_base 42: mod_base = OTHER; note = 2'-O-Methyl-adenosine
  modified_base 46: mod_base = OTHER; note = 2'-O-Methyl-adenosine
  modified_base 48: mod_base = OTHER; note = 2'-O-Methyl-adenosine
  modified_base 50: mod_base = OTHER; note = 2'-O-Methyl-uridine
  modified_base 52: mod_base = OTHER; note = 2'-O-Methyl-adenosine
  modified_base 53: mod_base = OTHER; note = 2'-O-Methyl-guanosine
  modified_base 54: mod_base = OTHER; note = 2'-O-Methyl-guanosine
  modified_base 55: mod_base = OTHER; note = 2'-O-Methyl-cytidine
  modified_base 56: mod_base = OTHER; note = 2'-O-Methyl-uridine
  modified_base 57: mod_base = OTHER; note = 2'-O-Methyl-adenosine
  modified_base 60: mod_base = OTHER; note = 2'-O-Methyl-cytidine
  modified_base 61: mod_base = OTHER; note = 2'-O-Methyl-cytidine
  modified_base 66: mod_base = OTHER; note = 2'-O-Methyl-uridine
  modified_base 67: mod_base = OTHER; note = 2'-O-Methyl-cytidine
  modified_base 70: mod_base = OTHER; note = 2'-O-Methyl-cytidine
  modified_base 71: mod_base = OTHER; note = 2'-O-Methyl-uridine
  modified_base 72: mod_base = OTHER; note = 2'-O-Methyl-uridine
  modified_base 73: mod_base = OTHER; note = 2'-O-Methyl-guanosine
  modified_base 74: mod_base = OTHER; note = 2'-O-Methyl-adenosine
  modified_base 75: mod_base = OTHER; note = 2'-O-Methyl-adenosine
  modified_base 76: mod_base = OTHER; note = 2'-O-Methyl-adenosine
  modified_base 77: mod_base = OTHER; note = 2'-O-Methyl-adenosine
  modified_base 78: mod_base = OTHER; note = 2'-O-Methyl-adenosine
  modified_base 79: mod_base = OTHER; note = 2'-O-Methyl-guanosine
  modified_base 80: mod_base = OTHER; note = 2'-O-Methyl-uridine
  modified_base 81: mod_base = OTHER; note = 2'-O-Methyl-guanosine
  modified_base 83: mod_base = OTHER; note = 2'-O-Methyl-cytidine
  modified_base 84: mod_base = OTHER; note = 2'-O-Methyl-adenosine
  modified_base 85: mod_base = OTHER; note = 2'-O-Methyl-cytidine
  modified_base 86: mod_base = OTHER; note = 2'-O-Methyl-cytidine
  modified_base 87: mod_base = OTHER; note = 2'-O-Methyl-guanosine
  modified_base 88: mod_base = OTHER; note = 2'-O-Methyl-adenosine
  modified_base 89: mod_base = OTHER; note = 2'-O-Methyl-guanosine
  modified_base 90: mod_base = OTHER; note = 2'-O-Methyl-uridine
  modified_base 91: mod_base = OTHER; note = 2'-O-Methyl-cytidine
  modified_base 92: mod_base = OTHER; note = 2'-O-Methyl-guanosine
  modified_base 93: mod_base = OTHER; note = 2'-O-Methyl-guanosine
  modified_base 94: mod_base = OTHER; note = 2'-O-Methyl-uridine
  modified_base 95: mod_base = OTHER; note = 2'-O-Methyl-guanosine
  modified_base 96: mod_base = OTHER; note = 2'-O-Methyl-cytidine
  modified_base 97: mod_base = OTHER; note = 2'-O-Methyl-uridine
  modified_base 98: mod_base = OTHER; note = 2'-O-Methyl-uridine phosphorothioate
  modified_base 99: mod_base = OTHER; note = 2'-O-Methyl-uridine phosphorothioate
  modified_base 100: mod_base = OTHER; note = 2'-O-Methyl-uridine

SEQ ID NO: 3121 - RNA, 100 nt, synthetic construct; identical to SEQ ID NO: 1917
  source 1..100: mol_type = other RNA
  modified_base 1: mod_base = OTHER; note = 2'-O-Methyl-cytidine phosphorothioate
  modified_base 2: mod_base = OTHER; note = 2'-O-Methyl-adenosine phosphorothioate
  modified_base 3: mod_base = OTHER; note = 2'-O-Methyl-guanosine
  modified_base 14: mod_base = OTHER; note = ribonebularine
  modified_base 21: mod_base = OTHER; note = 2'-O-Methyl-guanosine
  modified_base 28: mod_base = OTHER; note = 2'-O-Methyl-adenosine
  modified_base 29: mod_base = OTHER; note = 2'-O-Methyl-guanosine
  modified_base 30: mod_base = OTHER; note = 2'-O-Methyl-cytidine
  modified_base 31: mod_base = OTHER; note = 2'-O-Methyl-uridine
  modified_base 32: mod_base = OTHER; note = 2'-O-Methyl-adenosine
  modified_base 33: mod_base = OTHER; note = 2'-O-Methyl-guanosine
  modified_base 34: mod_base = OTHER; note = 2'-O-Methyl-adenosine
  modified_base 35: mod_base = OTHER; note = 2'-O-Methyl-adenosine
  modified_base 36: mod_base = OTHER; note = 2'-O-Methyl-adenosine
  modified_base 37: mod_base = OTHER; note = 2'-O-Methyl-uridine
  modified_base 38: mod_base = OTHER; note = 2'-O-Methyl-adenosine
  modified_base 39: mod_base = OTHER; note = 2'-O-Methyl-guanosine
  modified_base 40: mod_base = OTHER; note = 2'-O-Methyl-cytidine
  modified_base 41: mod_base = OTHER; note = 2'-O-Methyl-adenosine
  modified_base 42: mod_base = OTHER; note = 2'-O-Methyl-adenosine
  modified_base 46: mod_base = OTHER; note = 2'-O-Methyl-adenosine
  modified_base 48: mod_base = OTHER; note = 2'-O-Methyl-adenosine
  modified_base 50: mod_base = OTHER; note = 2'-O-Methyl-uridine
  modified_base 52: mod_base = OTHER; note = 2'-O-Methyl-adenosine
  modified_base 53: mod_base = OTHER; note = 2'-O-Methyl-guanosine
  modified_base 54: mod_base = OTHER; note = 2'-O-Methyl-guanosine
  modified_base 55: mod_base = OTHER; note = 2'-O-Methyl-cytidine
  modified_base 56: mod_base = OTHER; note = 2'-O-Methyl-uridine
  modified_base 57: mod_base = OTHER; note = 2'-O-methylnebularine
  modified_base 60: mod_base = OTHER; note = 2'-O-Methyl-cytidine
  modified_base 61: mod_base = OTHER; note = 2'-O-Methyl-cytidine
  modified_base 66: mod_base = OTHER; note = 2'-O-Methyl-uridine
  modified_base 67: mod_base = OTHER; note = 2'-O-Methyl-cytidine
  modified_base 70: mod_base = OTHER; note = 2'-O-Methyl-cytidine
  modified_base 71: mod_base = OTHER; note = 2'-O-Methyl-uridine
  modified_base 72: mod_base = OTHER; note = 2'-O-Methyl-uridine
  modified_base 73: mod_base = OTHER; note = 2'-O-Methyl-guanosine
  modified_base 74: mod_base = OTHER; note = 2'-O-Methyl-adenosine
  modified_base 75: mod_base = OTHER; note = 2'-O-Methyl-adenosine
  modified_base 76: mod_base = OTHER; note = 2'-O-Methyl-adenosine
  modified_base 77: mod_base = OTHER; note = 2'-O-Methyl-adenosine
  modified_base 78: mod_base = OTHER; note = 2'-O-Methyl-adenosine
  modified_base 79: mod_base = OTHER; note = 2'-O-Methyl-guanosine
  modified_base 80: mod_base = OTHER; note = 2'-O-Methyl-uridine
  modified_base 81: mod_base = OTHER; note = 2'-O-Methyl-guanosine
  modified_base 83: mod_base = OTHER; note = 2'-O-Methyl-cytidine
  modified_base 84: mod_base = OTHER; note = 2'-O-Methyl-adenosine
  modified_base 85: mod_base = OTHER; note = 2'-O-Methyl-cytidine
  modified_base 86: mod_base = OTHER; note = 2'-O-Methyl-cytidine
  modified_base 87: mod_base = OTHER; note = 2'-O-Methyl-guanosine
  modified_base 88: mod_base = OTHER; note = 2'-O-Methyl-adenosine
  modified_base 89: mod_base = OTHER; note = 2'-O-Methyl-guanosine
  modified_base 90: mod_base = OTHER; note = 2'-O-Methyl-uridine
  modified_base 91: mod_base = OTHER; note = 2'-O-Methyl-cytidine
  modified_base 92: mod_base = OTHER; note = 2'-O-Methyl-guanosine
  modified_base 93: mod_base = OTHER; note = 2'-O-Methyl-guanosine
  modified_base 94: mod_base = OTHER; note = 2'-O-Methyl-uridine
  modified_base 95: mod_base = OTHER; note = 2'-O-Methyl-guanosine
  modified_base 96: mod_base = OTHER; note = 2'-O-Methyl-cytidine
  modified_base 97: mod_base = OTHER; note = 2'-O-Methyl-uridine
  modified_base 98: mod_base = OTHER; note = 2'-O-Methyl-uridine phosphorothioate
  modified_base 99: mod_base = OTHER; note = 2'-O-Methyl-uridine phosphorothioate
  modified_base 100: mod_base = OTHER; note = 2'-O-Methyl-uridine

SEQ ID NO: 3122 - RNA, 100 nt, synthetic construct; identical to SEQ ID NO: 1915
  source 1..100: mol_type = other RNA
  modified_base 1: mod_base = OTHER; note = 2'-O-Methyl-cytidine phosphorothioate
  modified_base 2: mod_base = OTHER; note = 2'-O-Methyl-adenosine phosphorothioate
  modified_base 3: mod_base = OTHER; note = 2'-O-Methyl-guanosine
  modified_base 14: mod_base = OTHER; note = ribonebularine
  modified_base 21: mod_base = OTHER; note = 2'-O-Methyl-guanosine
  modified_base 28: mod_base = OTHER; note = 2'-O-Methyl-adenosine
  modified_base 29: mod_base = OTHER; note = 2'-O-Methyl-guanosine
  modified_base 30: mod_base = OTHER; note = 2'-O-Methyl-cytidine
  modified_base 31: mod_base = OTHER; note = 2'-O-Methyl-uridine
  modified_base 32: mod_base = OTHER; note = 2'-O-Methyl-adenosine
  modified_base 33: mod_base = OTHER; note = 2'-O-Methyl-guanosine
  modified_base 34: mod_base = OTHER; note = 2'-O-methylnebularine
  modified_base 35: mod_base = OTHER; note = 2'-O-Methyl-adenosine
  modified_base 36: mod_base = OTHER; note = 2'-O-Methyl-adenosine
  modified_base 37: mod_base = OTHER; note = 2'-O-Methyl-uridine
  modified_base 38: mod_base = OTHER; note = 2'-O-Methyl-adenosine
  modified_base 39: mod_base = OTHER; note = 2'-O-Methyl-guanosine
  modified_base 40: mod_base = OTHER; note = 2'-O-Methyl-cytidine
  modified_base 41: mod_base = OTHER; note = 2'-O-Methyl-adenosine
  modified_base 42: mod_base = OTHER; note = 2'-O-Methyl-adenosine
  modified_base 46: mod_base = OTHER; note = 2'-O-Methyl-adenosine
  modified_base 48: mod_base = OTHER; note = 2'-O-Methyl-adenosine
  modified_base 50: mod_base = OTHER; note = 2'-O-Methyl-uridine
  modified_base 52: mod_base = OTHER; note = 2'-O-Methyl-adenosine
  modified_base 53: mod_base = OTHER; note = 2'-O-Methyl-guanosine
  modified_base 54: mod_base = OTHER; note = 2'-O-Methyl-guanosine
  modified_base 55: mod_base = OTHER; note = 2'-O-Methyl-cytidine
  modified_base 56: mod_base = OTHER; note = 2'-O-Methyl-uridine
  modified_base 57: mod_base = OTHER; note = 2'-O-Methyl-adenosine
  modified_base 60: mod_base = OTHER; note = 2'-O-Methyl-cytidine
  modified_base 61: mod_base = OTHER; note = 2'-O-Methyl-cytidine
  modified_base 66: mod_base = OTHER; note = 2'-O-Methyl-uridine
  modified_base 67: mod_base = OTHER; note = 2'-O-Methyl-cytidine
  modified_base 70: mod_base = OTHER; note = 2'-O-Methyl-cytidine
  modified_base 71: mod_base = OTHER; note = 2'-O-Methyl-uridine
  modified_base 72: mod_base = OTHER; note = 2'-O-Methyl-uridine
  modified_base 73: mod_base = OTHER; note = 2'-O-Methyl-guanosine
  modified_base 74: mod_base = OTHER; note = 2'-O-Methyl-adenosine
  modified_base 75: mod_base = OTHER; note = 2'-O-Methyl-adenosine
  modified_base 76: mod_base = OTHER; note = 2'-O-Methyl-adenosine
  modified_base 77: mod_base = OTHER; note = 2'-O-Methyl-adenosine
  modified_base 78: mod_base = OTHER; note = 2'-O-Methyl-adenosine
  modified_base 79: mod_base = OTHER; note = 2'-O-Methyl-guanosine
  modified_base 80: mod_base = OTHER; note = 2'-O-Methyl-uridine
  modified_base 81: mod_base = OTHER; note = 2'-O-Methyl-guanosine
  modified_base 83: mod_base = OTHER; note = 2'-O-Methyl-cytidine
  modified_base 84: mod_base = OTHER; note = 2'-O-Methyl-adenosine
  modified_base 85: mod_base = OTHER; note = 2'-O-Methyl-cytidine
  modified_base 86: mod_base = OTHER; note = 2'-O-Methyl-cytidine
  modified_base 87: mod_base = OTHER; note = 2'-O-Methyl-guanosine
  modified_base 88: mod_base = OTHER; note = 2'-O-Methyl-adenosine
  modified_base 89: mod_base = OTHER; note = 2'-O-Methyl-guanosine
  modified_base 90: mod_base = OTHER; note = 2'-O-Methyl-uridine
  modified_base 91: mod_base = OTHER; note = 2'-O-Methyl-cytidine
  modified_base 92: mod_base = OTHER; note = 2'-O-Methyl-guanosine
  modified_base 93: mod_base = OTHER; note = 2'-O-Methyl-guanosine
  modified_base 94: mod_base = OTHER; note = 2'-O-Methyl-uridine
  modified_base 95: mod_base = OTHER; note = 2'-O-Methyl-guanosine
  modified_base 96: mod_base = OTHER; note = 2'-O-Methyl-cytidine
  modified_base 97: mod_base = OTHER; note = 2'-O-Methyl-uridine
  modified_base 98: mod_base = OTHER; note = 2'-O-Methyl-uridine phosphorothioate
  modified_base 99: mod_base = OTHER; note = 2'-O-Methyl-uridine phosphorothioate
  modified_base 100: mod_base = OTHER; note = 2'-O-Methyl-uridine

SEQ ID NO: 3123 - RNA, 100 nt, synthetic construct; identical to SEQ ID NO: 1911
  source 1..100: mol_type = other RNA
  modified_base 1: mod_base = OTHER; note = 2'-O-Methyl-cytidine phosphorothioate
  modified_base 2: mod_base = OTHER; note = 2'-O-Methyl-adenosine phosphorothioate
  modified_base 3: mod_base = OTHER; note = 2'-O-Methyl-guanosine
  modified_base 9: mod_base = OTHER; note = ribonebularine
  modified_base 21: mod_base = OTHER; note = 2'-O-Methyl-guanosine
  modified_base 28: mod_base = OTHER; note = 2'-O-Methyl-adenosine
  modified_base 29: mod_base = OTHER; note = 2'-O-Methyl-guanosine
  modified_base 30: mod_base = OTHER; note = 2'-O-Methyl-cytidine
  modified_base 31: mod_base = OTHER; note = 2'-O-Methyl-uridine
  modified_base 32: mod_base = OTHER; note = 2'-O-Methyl-adenosine
  modified_base 33: mod_base = OTHER; note = 2'-O-Methyl-guanosine
  modified_base 34: mod_base = OTHER; note = 2'-O-Methyl-adenosine
  modified_base 35: mod_base = OTHER; note = 2'-O-Methyl-adenosine
  modified_base 36: mod_base = OTHER; note = 2'-O-Methyl-adenosine
  modified_base 37: mod_base = OTHER; note = 2'-O-Methyl-uridine
  modified_base 38: mod_base = OTHER; note = 2'-O-Methyl-adenosine
  modified_base 39: mod_base = OTHER; note = 2'-O-Methyl-guanosine
  modified_base 40: mod_base = OTHER; note = 2'-O-Methyl-cytidine
  modified_base 41: mod_base = OTHER; note = 2'-O-Methyl-adenosine
  modified_base 42: mod_base = OTHER; note = 2'-O-Methyl-adenosine
  modified_base 46: mod_base = OTHER; note = 2'-O-Methyl-adenosine
  modified_base 48: mod_base = OTHER; note = 2'-O-Methyl-adenosine
  modified_base 50: mod_base = OTHER; note = 2'-O-Methyl-uridine
  modified_base 52: mod_base = OTHER; note = 2'-O-Methyl-adenosine
  modified_base 53: mod_base = OTHER; note = 2'-O-Methyl-guanosine
  modified_base 54: mod_base = OTHER; note = 2'-O-Methyl-guanosine
  modified_base 55: mod_base = OTHER; note = 2'-O-Methyl-cytidine
  modified_base 56: mod_base = OTHER; note = 2'-O-Methyl-uridine
  modified_base 57: mod_base = OTHER; note = 2'-O-methylnebularine
  modified_base 60: mod_base = OTHER; note = 2'-O-Methyl-cytidine
  modified_base 61: mod_base = OTHER; note = 2'-O-Methyl-cytidine
  modified_base 66: mod_base = OTHER; note = 2'-O-Methyl-uridine
  modified_base 67: mod_base = OTHER; note = 2'-O-Methyl-cytidine
  modified_base 70: mod_base = OTHER; note = 2'-O-Methyl-cytidine
  modified_base 71: mod_base = OTHER; note = 2'-O-Methyl-uridine
  modified_base 72: mod_base = OTHER; note = 2'-O-Methyl-uridine
  modified_base 73: mod_base = OTHER; note = 2'-O-Methyl-guanosine
  modified_base 74: mod_base = OTHER; note = 2'-O-Methyl-adenosine
  modified_base 75: mod_base = OTHER; note = 2'-O-Methyl-adenosine
  modified_base 76: mod_base = OTHER; note = 2'-O-Methyl-adenosine
  modified_base 77: mod_base = OTHER; note = 2'-O-Methyl-adenosine
  modified_base 78: mod_base = OTHER; note = 2'-O-Methyl-adenosine
  modified_base 79: mod_base = OTHER; note = 2'-O-Methyl-guanosine
  modified_base 80: mod_base = OTHER; note = 2'-O-Methyl-uridine
  modified_base 81: mod_base = OTHER; note = 2'-O-Methyl-guanosine
  modified_base 83: mod_base = OTHER; note = 2'-O-Methyl-cytidine
  modified_base 84: mod_base = OTHER; note = 2'-O-Methyl-adenosine
  modified_base 85: mod_base = OTHER; note = 2'-O-Methyl-cytidine
  modified_base 86: mod_base = OTHER; note = 2'-O-Methyl-cytidine
  modified_base 87: mod_base = OTHER; note = 2'-O-Methyl-guanosine
  modified_base 88: mod_base = OTHER; note = 2'-O-Methyl-adenosine
  modified_base 89: mod_base = OTHER; note = 2'-O-Methyl-guanosine
  modified_base 90: mod_base = OTHER; note = 2'-O-Methyl-uridine
  modified_base 91: mod_base = OTHER; note = 2'-O-Methyl-cytidine
  modified_base 92: mod_base = OTHER; note = 2'-O-Methyl-guanosine
  modified_base 93: mod_base = OTHER; note = 2'-O-Methyl-guanosine
  modified_base 94: mod_base = OTHER; note = 2'-O-Methyl-uridine
  modified_base 95: mod_base = OTHER; note = 2'-O-Methyl-guanosine
  modified_base 96: mod_base = OTHER; note = 2'-O-Methyl-cytidine
  modified_base 97: mod_base = OTHER; note = 2'-O-Methyl-uridine
  modified_base 98: mod_base = OTHER; note = 2'-O-Methyl-uridine phosphorothioate
  modified_base 99: mod_base = OTHER; note = 2'-O-Methyl-uridine phosphorothioate
  modified_base 100: mod_base = OTHER; note = 2'-O-Methyl-uridine

SEQ ID NO: 3124 - RNA, 100 nt, synthetic construct; identical to SEQ ID NO: 2109
  source 1..100: mol_type = other RNA
  modified_base 1: mod_base = OTHER; note = 2'-O-Methyl-cytidine phosphorothioate
  modified_base 2: mod_base = OTHER; note = 2'-O-Methyl-adenosine phosphorothioate
  modified_base 3: mod_base = OTHER; note = 2'-O-Methyl-guanosine phosphorothioate
  modified_base 21: mod_base = OTHER; note = 2'-O-Methyl-guanosine
  modified_base 28: mod_base = OTHER; note = 2'-O-Methyl-adenosine
  modified_base 29: mod_base = OTHER; note = 2'-O-Methyl-guanosine
  modified_base 30: mod_base = OTHER; note = 2'-O-Methyl-cytidine
  modified_base 31: mod_base = OTHER; note = 2'-O-Methyl-uridine
  modified_base 32: mod_base = OTHER; note = 2'-O-Methyl-adenosine
  modified_base 33: mod_base = OTHER; note = 2'-O-Methyl-guanosine
  modified_base 34: mod_base = OTHER; note = 2'-O-Methyl-adenosine
  modified_base 35: mod_base = OTHER; note = 2'-O-Methyl-adenosine
  modified_base 36: mod_base = OTHER; note = 2'-O-Methyl-adenosine
  modified_base 37: mod_base = OTHER; note = 2'-O-Methyl-uridine
  modified_base 38: mod_base = OTHER; note = 2'-O-Methyl-adenosine
  modified_base 39: mod_base = OTHER; note = 2'-O-Methyl-guanosine
  modified_base 40: mod_base = OTHER; note = 2'-O-Methyl-cytidine
  modified_base 41: mod_base = OTHER; note = 2'-O-Methyl-adenosine
  modified_base 42: mod_base = OTHER; note = 2'-O-Methyl-adenosine
  modified_base 46: mod_base = OTHER; note = 2'-O-Methyl-adenosine
  modified_base 48: mod_base = OTHER; note = 2'-O-Methyl-adenosine
  modified_base 50: mod_base = OTHER; note = 2'-O-Methyl-uridine
  modified_base 52: mod_base = OTHER; note = 2'-O-Methyl-adenosine
  modified_base 53: mod_base = OTHER; note = 2'-O-Methyl-guanosine
  modified_base 54: mod_base = OTHER; note = 2'-O-Methyl-guanosine
  modified_base 55: mod_base = OTHER; note = 2'-O-Methyl-cytidine
  modified_base 56: mod_base = OTHER; note = 2'-O-Methyl-uridine
  modified_base 57: mod_base = OTHER; note = 2'-O-Methyl-adenosine
  modified_base 60: mod_base = OTHER; note = 2'-O-Methyl-cytidine
  modified_base 61: mod_base = OTHER; note = 2'-O-Methyl-cytidine
  modified_base 66: mod_base = OTHER; note = 2'-O-Methyl-uridine
  modified_base 67: mod_base = OTHER; note = 2'-O-Methyl-cytidine
  modified_base 70: mod_base = OTHER; note = 2'-O-Methyl-cytidine
  modified_base 71: mod_base = OTHER; note = 2'-O-Methyl-uridine
  modified_base 72: mod_base = OTHER; note = 2'-O-Methyl-uridine
  modified_base 73: mod_base = OTHER; note = 2'-O-Methyl-guanosine
  modified_base 74: mod_base = OTHER; note = 2'-O-Methyl-adenosine
  modified_base 75: mod_base = OTHER; note = 2'-O-Methyl-adenosine
  modified_base 76: mod_base = OTHER; note = 2'-O-Methyl-adenosine
  modified_base 77: mod_base = OTHER; note = 2'-O-Methyl-adenosine
  modified_base 78: mod_base = OTHER; note = 2'-O-Methyl-adenosine
  modified_base 79: mod_base = OTHER; note = 2'-O-Methyl-guanosine
  modified_base 80: mod_base = OTHER; note = 2'-O-Methyl-uridine
  modified_base 81: mod_base = OTHER; note = 2'-O-Methyl-guanosine
  modified_base 83: mod_base = OTHER; note = 2'-O-Methyl-cytidine
  modified_base 84: mod_base = OTHER; note = 2'-O-Methyl-adenosine
  modified_base 85: mod_base = OTHER; note = 2'-O-Methyl-cytidine
  modified_base 86: mod_base = OTHER; note = 2'-O-Methyl-cytidine
  modified_base 87: mod_base = OTHER; note = 2'-O-Methyl-guanosine
  modified_base 88: mod_base = OTHER; note = 2'-O-Methyl-adenosine
  modified_base 89: mod_base = OTHER; note = 2'-O-Methyl-guanosine
  modified_base 90: mod_base = OTHER; note = 2'-O-Methyl-uridine
  modified_base 91: mod_base = OTHER; note = 2'-O-Methyl-cytidine
  modified_base 92: mod_base = OTHER; note = 2'-O-Methyl-guanosine
  modified_base 93: mod_base = OTHER; note = 2'-O-Methyl-guanosine
  modified_base 94: mod_base = OTHER; note = 2'-O-Methyl-uridine
  modified_base 95: mod_base = OTHER; note = 2'-O-Methyl-guanosine
  modified_base 96: mod_base = OTHER; note = 2'-O-Methyl-cytidine
  modified_base 97: mod_base = OTHER; note = 2'-O-Methyl-uridine phosphorothioate
  modified_base 98: mod_base = OTHER; note = 2'-O-methylnebularine phosphorothioate
  modified_base 99: mod_base = OTHER; note = 2'-O-methylnebularine phosphorothioate
  modified_base 100: mod_base = OTHER; note = 2'-O-methylnebularine

SEQ ID NO: 3125 - RNA, 100 nt, synthetic construct; identical to SEQ ID NO: 2111
  source 1..100: mol_type = other RNA
  modified_base 1: mod_base = OTHER; note = 2'-O-Methyl-cytidine phosphorothioate
  modified_base 2: mod_base = OTHER; note = 2'-O-Methyl-adenosine phosphorothioate
  modified_base 3: mod_base = OTHER; note = 2'-O-Methyl-guanosine phosphorothioate
  modified_base 21: mod_base = OTHER; note = 2'-O-Methyl-guanosine
  modified_base 28: mod_base = OTHER; note = 2'-O-Methyl-adenosine
  modified_base 29: mod_base = OTHER; note = 2'-O-Methyl-guanosine
  modified_base 30: mod_base = OTHER; note = 2'-O-Methyl-cytidine
  modified_base 31: mod_base = OTHER; note = 2'-O-Methyl-uridine
  modified_base 32: mod_base = OTHER; note = 2'-O-Methyl-adenosine
  modified_base 33: mod_base = OTHER; note = 2'-O-Methyl-guanosine
  modified_base 34: mod_base = OTHER; note = 2'-O-Methyl-adenosine
  modified_base 35: mod_base = OTHER; note = 2'-O-Methyl-adenosine
  modified_base 36: mod_base = OTHER; note = 2'-O-Methyl-adenosine
  modified_base 37: mod_base = OTHER; note = 2'-O-Methyl-uridine
  modified_base 38: mod_base = OTHER; note = 2'-O-Methyl-adenosine
  modified_base 39: mod_base = OTHER; note = 2'-O-Methyl-guanosine
  modified_base 40: mod_base = OTHER; note = 2'-O-Methyl-cytidine
  modified_base 41: mod_base = OTHER; note = 2'-O-Methyl-adenosine
  modified_base 42: mod_base = OTHER; note = 2'-O-Methyl-adenosine
  modified_base 46: mod_base = OTHER; note = 2'-O-Methyl-adenosine
  modified_base 48: mod_base = OTHER; note = 2'-O-Methyl-adenosine
  modified_base 50: mod_base = OTHER; note = 2'-O-Methyl-uridine
  modified_base 52: mod_base = OTHER; note = 2'-O-Methyl-adenosine
  modified_base 53: mod_base = OTHER; note = 2'-O-Methyl-guanosine
  modified_base 54: mod_base = OTHER; note = 2'-O-Methyl-guanosine
  modified_base 55: mod_base = OTHER; note = 2'-O-Methyl-cytidine
  modified_base 56: mod_base = OTHER; note = 2'-O-Methyl-uridine
  modified_base 57: mod_base = OTHER; note = 2'-O-Methyl-adenosine
  modified_base 60: mod_base = OTHER; note = 2'-O-Methyl-cytidine
  modified_base 61: mod_base = OTHER; note = 2'-O-Methyl-cytidine
  modified_base 66: mod_base = OTHER; note = 2'-O-Methyl-uridine
  modified_base 67: mod_base = OTHER; note = 2'-O-Methyl-cytidine
  modified_base 70: mod_base = OTHER; note = 2'-O-Methyl-cytidine
  modified_base 71: mod_base = OTHER; note = 2'-O-Methyl-uridine
  modified_base 72: mod_base = OTHER; note = 2'-O-Methyl-uridine
  modified_base 73: mod_base = OTHER; note = 2'-O-Methyl-guanosine
  modified_base 74: mod_base = OTHER; note = 2'-O-Methyl-adenosine
  modified_base 75: mod_base = OTHER; note = 2'-O-Methyl-adenosine
  modified_base 76: mod_base = OTHER; note = 2'-O-Methyl-adenosine
  modified_base 77: mod_base = OTHER; note = 2'-O-Methyl-adenosine
  modified_base 78: mod_base = OTHER; note = 2'-O-Methyl-adenosine
  modified_base 79: mod_base = OTHER; note = 2'-O-Methyl-guanosine
  modified_base 80: mod_base = OTHER; note = 2'-O-Methyl-uridine
  modified_base 81: mod_base = OTHER; note = 2'-O-Methyl-guanosine
  modified_base 83: mod_base = OTHER; note = 2'-O-Methyl-cytidine
  modified_base 84: mod_base = OTHER; note = 2'-O-Methyl-adenosine
  modified_base 85: mod_base = OTHER; note = 2'-O-Methyl-cytidine
  modified_base 86: mod_base = OTHER; note = 2'-O-Methyl-cytidine
  modified_base 87: mod_base = OTHER; note = 2'-O-Methyl-guanosine
  modified_base 88: mod_base = OTHER; note = 2'-O-Methyl-adenosine
  modified_base 89: mod_base = OTHER; note = 2'-O-Methyl-guanosine
  modified_base 90: mod_base = OTHER; note = 2'-O-Methyl-uridine
  modified_base 91: mod_base = OTHER; note = 2'-O-Methyl-cytidine
  modified_base 92: mod_base = OTHER; note = 2'-O-Methyl-guanosine
  modified_base 93: mod_base = OTHER; note = 2'-O-Methyl-guanosine
  modified_base 94: mod_base = OTHER; note = 2'-O-Methyl-uridine
  modified_base 95: mod_base = OTHER; note = 2'-O-Methyl-guanosine
  modified_base 96: mod_base = OTHER; note = 2'-O-Methyl-cytidine
  modified_base 97: mod_base = OTHER; note = 2'-O-Methyl-uridine phosphorothioate
  modified_base 98: mod_base = OTHER; note = 2'-O-Methyl-uridine phosphorothioate
  modified_base 99: mod_base = OTHER; note = 2'-O-methylnebularine phosphorothioate
  modified_base 100: mod_base = OTHER; note = 2'-O-methylnebularine

SEQ ID NO: 3126 - RNA, 100 nt, synthetic construct; identical to SEQ ID NO: 2113
  source 1..100: mol_type = other RNA
  modified_base 1: mod_base = OTHER; note = 2'-O-Methyl-cytidine phosphorothioate
  modified_base 2: mod_base = OTHER; note = 2'-O-Methyl-adenosine phosphorothioate
  modified_base 3: mod_base = OTHER; note = 2'-O-Methyl-guanosine phosphorothioate
  modified_base 21: mod_base = OTHER; note = 2'-O-Methyl-guanosine
  modified_base 28: mod_base = OTHER; note = 2'-O-Methyl-adenosine
  modified_base 29: mod_base = OTHER; note = 2'-O-Methyl-guanosine
  modified_base 30: mod_base = OTHER; note = 2'-O-Methyl-cytidine
  modified_base 31: mod_base = OTHER; note = 2'-O-Methyl-uridine
  modified_base 32: mod_base = OTHER; note = 2'-O-Methyl-adenosine
  modified_base 33: mod_base = OTHER; note = 2'-O-Methyl-guanosine
  modified_base 34: mod_base = OTHER; note = 2'-O-Methyl-adenosine
  modified_base 35: mod_base = OTHER; note = 2'-O-Methyl-adenosine
  modified_base 36: mod_base = OTHER; note = 2'-O-Methyl-adenosine
  modified_base 37: mod_base = OTHER; note = 2'-O-Methyl-uridine
  modified_base 38: mod_base = OTHER; note = 2'-O-Methyl-adenosine
  modified_base 39: mod_base = OTHER; note = 2'-O-Methyl-guanosine
  modified_base 40: mod_base = OTHER; note = 2'-O-Methyl-cytidine
  modified_base 41: mod_base = OTHER; note = 2'-O-Methyl-adenosine
  modified_base 42: mod_base = OTHER; note = 2'-O-Methyl-adenosine
  modified_base 46: mod_base = OTHER; note = 2'-O-Methyl-adenosine
  modified_base 48: mod_base = OTHER; note = 2'-O-Methyl-adenosine
  modified_base 50: mod_base = OTHER; note = 2'-O-Methyl-uridine
  modified_base 52: mod_base = OTHER; note = 2'-O-Methyl-adenosine
  modified_base 53: mod_base = OTHER; note = 2'-O-Methyl-guanosine
  modified_base 54: mod_base = OTHER; note = 2'-O-Methyl-guanosine
  modified_base 55: mod_base = OTHER; note = 2'-O-Methyl-cytidine
  modified_base 56: mod_base = OTHER; note = 2'-O-Methyl-uridine
  modified_base 57: mod_base = OTHER; note = 2'-O-Methyl-adenosine
  modified_base 60: mod_base = OTHER; note = 2'-O-Methyl-cytidine
  modified_base 61: mod_base = OTHER; note = 2'-O-Methyl-cytidine
  modified_base 66: mod_base = OTHER; note = 2'-O-Methyl-uridine
  modified_base 67: mod_base = OTHER; note = 2'-O-Methyl-cytidine
  modified_base 70: mod_base = OTHER; note = 2'-O-Methyl-cytidine
  modified_base 71: mod_base = OTHER; note = 2'-O-Methyl-uridine
  modified_base 72: mod_base = OTHER; note = 2'-O-Methyl-uridine
  modified_base 73: mod_base = OTHER; note = 2'-O-Methyl-guanosine
  modified_base 74: mod_base = OTHER; note = 2'-O-Methyl-adenosine
  modified_base 75: mod_base = OTHER; note = 2'-O-Methyl-adenosine
  modified_base 76: mod_base = OTHER; note = 2'-O-Methyl-adenosine
  modified_base 77: mod_base = OTHER; note = 2'-O-Methyl-adenosine
  modified_base 78: mod_base = OTHER; note = 2'-O-Methyl-adenosine
  modified_base 79: mod_base = OTHER; note = 2'-O-Methyl-guanosine
  modified_base 80: mod_base = OTHER; note = 2'-O-Methyl-uridine
  modified_base 81: mod_base = OTHER; note = 2'-O-Methyl-guanosine
  modified_base 83: mod_base = OTHER; note = 2'-O-Methyl-cytidine
  modified_base 84: mod_base = OTHER; note = 2'-O-Methyl-adenosine
  modified_base 85: mod_base = OTHER; note = 2'-O-Methyl-cytidine
  modified_base 86: mod_base = OTHER; note = 2'-O-Methyl-cytidine
  modified_base 87: mod_base = OTHER; note = 2'-O-Methyl-guanosine
  modified_base 88: mod_base = OTHER; note = 2'-O-Methyl-adenosine
  modified_base 89: mod_base = OTHER; note = 2'-O-Methyl-guanosine
  modified_base 90: mod_base = OTHER; note = 2'-O-Methyl-uridine
  modified_base 91: mod_base = OTHER; note = 2'-O-Methyl-cytidine
  modified_base 92: mod_base = OTHER; note = 2'-O-Methyl-guanosine
  modified_base 93: mod_base = OTHER; note = 2'-O-Methyl-guanosine
  modified_base 94: mod_base = OTHER; note = 2'-O-Methyl-uridine
  modified_base 95: mod_base = OTHER; note = 2'-O-Methyl-guanosine
  modified_base 96: mod_base = OTHER; note = 2'-O-Methyl-cytidine
  modified_base 97: mod_base = OTHER; note = 2'-O-Methyl-uridine phosphorothioate
  modified_base 98: mod_base = OTHER; note = 2'-O-Methyl-uridine phosphorothioate
  modified_base 99: mod_base = OTHER; note = 2'-O-Methyl-uridine phosphorothioate
  modified_base 100: mod_base = OTHER; note = 2'-O-methylnebularine

SEQ ID NO: 3127 - RNA, 100 nt, synthetic construct; identical to SEQ ID NO: 2109
  source 1..100: mol_type = other RNA
  modified_base 1: mod_base = OTHER; note = 2'-O-Methyl-cytidine phosphorothioate
  modified_base 2: mod_base = OTHER; note = 2'-O-Methyl-adenosine phosphorothioate
  modified_base 3: mod_base = OTHER; note = 2'-O-Methyl-guanosine phosphorothioate
  modified_base 29: mod_base = OTHER; note = 2'-O-Methyl-guanosine
  modified_base 30: mod_base = OTHER; note = 2'-O-Methyl-cytidine
  modified_base 31: mod_base = OTHER; note = 2'-O-Methyl-uridine
  modified_base 32: mod_base = OTHER; note = 2'-O-Methyl-adenosine
  modified_base 33: mod_base = OTHER; note = 2'-O-Methyl-guanosine
  modified_base 34: mod_base = OTHER; note = 2'-O-Methyl-adenosine
  modified_base 35: mod_base = OTHER; note = 2'-O-Methyl-adenosine
  modified_base 36: mod_base = OTHER; note = 2'-O-Methyl-adenosine
  modified_base 37: mod_base = OTHER; note = 2'-O-Methyl-uridine
  modified_base 38: mod_base = OTHER; note = 2'-O-Methyl-adenosine
  modified_base 39: mod_base = OTHER; note = 2'-O-Methyl-guanosine
  modified_base 40: mod_base = OTHER; note = 2'-O-Methyl-cytidine
  modified_base 69: mod_base = OTHER; note = 2'-O-Methyl-adenosine
  modified_base 70: mod_base = OTHER; note = 2'-O-Methyl-cytidine
  modified_base 71: mod_base = OTHER; note = 2'-O-Methyl-uridine
  modified_base 72: mod_base = OTHER; note = 2'-O-Methyl-uridine
  modified_base 73: mod_base = OTHER; note = 2'-O-Methyl-guanosine
  modified_base 74: mod_base = OTHER; note = 2'-O-Methyl-adenosine
  modified_base 75: mod_base = OTHER; note = 2'-O-Methyl-adenosine
  modified_base 76: mod_base = OTHER; note = 2'-O-Methyl-adenosine
  modified_base 77: mod_base = OTHER; note = 2'-O-Methyl-adenosine
  modified_base 78: mod_base = OTHER; note = 2'-O-Methyl-adenosine
  modified_base 79: mod_base = OTHER; note = 2'-O-Methyl-guanosine
  modified_base 80: mod_base = OTHER; note = 2'-O-Methyl-uridine
  modified_base 81: mod_base = OTHER; note = 2'-O-Methyl-guanosine
  modified_base 82: mod_base = OTHER; note = 2'-O-Methyl-guanosine
  modified_base 83: mod_base = OTHER; note = 2'-O-Methyl-cytidine
  modified_base 84: mod_base = OTHER; note = 2'-O-Methyl-adenosine
  modified_base 85: mod_base = OTHER; note = 2'-O-Methyl-cytidine
  modified_base 86: mod_base = OTHER; note = 2'-O-Methyl-cytidine
  modified_base 87: mod_base = OTHER; note = 2'-O-Methyl-guanosine
  modified_base 88: mod_base = OTHER; note = 2'-O-Methyl-adenosine
  modified_base 89: mod_base = OTHER; note = 2'-O-Methyl-guanosine
  modified_base 90: mod_base = OTHER; note = 2'-O-Methyl-uridine
  modified_base 91: mod_base = OTHER; note = 2'-O-Methyl-cytidine
  modified_base 92: mod_base = OTHER; note = 2'-O-Methyl-guanosine
  modified_base 93: mod_base = OTHER; note = 2'-O-Methyl-guanosine
  modified_base 94: mod_base = OTHER; note = 2'-O-Methyl-uridine
  modified_base 95: mod_base = OTHER; note = 2'-O-Methyl-guanosine
  modified_base 96: mod_base = OTHER; note = 2'-O-Methyl-cytidine
  modified_base 97: mod_base = OTHER; note = 2'-O-Methyl-uridine phosphorothioate
  modified_base 98: mod_base = OTHER; note = ribonebularine phosphorothioate
  modified_base 99: mod_base = OTHER; note = ribonebularine phosphorothioate
  modified_base 100: mod_base = OTHER; note = ribonebularine

SEQ ID NO: 3128 - RNA, 100 nt, synthetic construct; identical to SEQ ID NO: 2109
  source 1..100: mol_type = other RNA
  modified_base 1: mod_base = OTHER; note = 2'-O-Methyl-cytidine phosphorothioate
  modified_base 2: mod_base = OTHER; note = 2'-O-Methyl-adenosine phosphorothioate
  modified_base 3: mod_base = OTHER; note = 2'-O-Methyl-guanosine phosphorothioate
  modified_base 21: mod_base = OTHER; note = 2'-O-Methyl-guanosine
  modified_base 28: mod_base = OTHER; note = 2'-O-Methyl-adenosine
  modified_base 29: mod_base = OTHER; note = 2'-O-Methyl-guanosine
  modified_base 30: mod_base = OTHER; note = 2'-O-Methyl-cytidine
  modified_base 31: mod_base = OTHER; note = 2'-O-Methyl-uridine
  modified_base 32: mod_base = OTHER; note = 2'-O-Methyl-adenosine
  modified_base 34: mod_base = OTHER; note = 2'-O-Methyl-adenosine
  modified_base 35: mod_base = OTHER; note = 2'-O-Methyl-adenosine
  modified_base 36: mod_base = OTHER; note = 2'-O-Methyl-adenosine
  modified_base 37: mod_base = OTHER; note = 2'-O-Methyl-uridine
  modified_base 38: mod_base = OTHER; note = 2'-O-Methyl-adenosine
  modified_base 39: mod_base = OTHER; note = 2'-O-Methyl-guanosine
  modified_base 40: mod_base = OTHER; note = 2'-O-Methyl-cytidine
  modified_base 41: mod_base = OTHER; note = 2'-O-Methyl-adenosine
  modified_base 42: mod_base = OTHER; note = 2'-O-Methyl-adenosine
  modified_base 46: mod_base = OTHER; note = 2'-O-Methyl-adenosine
  modified_base 48: mod_base = OTHER; note = 2'-O-Methyl-adenosine
  modified_base 50: mod_base = OTHER; note = 2'-O-Methyl-uridine
  modified_base 52: mod_base = OTHER; note = 2'-O-Methyl-adenosine
  modified_base 53: mod_base = OTHER; note = 2'-O-Methyl-guanosine
  modified_base 54: mod_base = OTHER; note = 2'-O-Methyl-guanosine
  modified_base 57: mod_base = OTHER; note = 2'-O-Methyl-adenosine
  modified_base 61: mod_base = OTHER; note = 2'-O-Methyl-cytidine
  modified_base 66: mod_base = OTHER; note = 2'-O-Methyl-uridine
  modified_base 67: mod_base = OTHER; note = 2'-O-Methyl-cytidine
  modified_base 70: mod_base = OTHER; note = 2'-O-Methyl-cytidine
  modified_base 71: mod_base = OTHER; note = 2'-O-Methyl-uridine
  modified_base 72: mod_base = OTHER; note = 2'-O-Methyl-uridine
  modified_base 74: mod_base = OTHER; note = 2'-O-Methyl-adenosine
  modified_base 75: mod_base = OTHER; note = 2'-O-Methyl-adenosine
  modified_base 76: mod_base = OTHER; note = 2'-O-Methyl-adenosine
  modified_base 77: mod_base = OTHER; note = 2'-O-Methyl-adenosine
  modified_base 78: mod_base = OTHER; note = 2'-O-Methyl-adenosine
  modified_base 79: mod_base = OTHER; note = 2'-O-Methyl-guanosine
  modified_base 80: mod_base = OTHER; note = 2'-O-Methyl-uridine
  modified_base 82: mod_base = OTHER; note = 2'-O-Methyl-guanosine
  modified_base 83: mod_base = OTHER; note = 2'-O-Methyl-cytidine
  modified_base 84: mod_base = OTHER; note = 2'-O-Methyl-adenosine
  modified_base 85: mod_base = OTHER; note = 2'-O-Methyl-cytidine
  modified_base 86: mod_base = OTHER; note = 2'-O-Methyl-cytidine
  modified_base 87: mod_base = OTHER; note = 2'-O-Methyl-guanosine
  modified_base 89: mod_base = OTHER; note = 2'-O-Methyl-guanosine
  modified_base 92: mod_base = OTHER; note = 2'-O-Methyl-guanosine
  modified_base 93: mod_base = OTHER; note = 2'-O-Methyl-guanosine
  modified_base 94: mod_base = OTHER; note = 2'-O-Methyl-uridine
  modified_base 95: mod_base = OTHER; note = 2'-O-Methyl-guanosine
  modified_base 96: mod_base = OTHER; note = 2'-O-Methyl-cytidine
  modified_base 97: mod_base = OTHER; note = 2'-O-Methyl-uridine phosphorothioate
  modified_base 98: mod_base = OTHER; note = ribonebularine phosphorothioate
  modified_base 99: mod_base = OTHER; note = ribonebularine phosphorothioate
  modified_base 100: mod_base = OTHER; note = ribonebularine

SEQ ID NO: 3129 - RNA, 100 nt, synthetic construct; identical to SEQ ID NO: 2109
  source 1..100: mol_type = other RNA
  modified_base 1: mod_base = OTHER; note = 2'-O-Methyl-cytidine phosphorothioate
  modified_base 2: mod_base = OTHER; note = 2'-O-Methyl-adenosine phosphorothioate
  modified_base 3: mod_base = OTHER; note = 2'-O-Methyl-guanosine phosphorothioate
  modified_base 21: mod_base = OTHER; note = 2'-O-Methyl-guanosine
  modified_base 28: mod_base = OTHER; note = 2'-O-Methyl-adenosine
  modified_base 29: mod_base = OTHER; note = 2'-O-Methyl-guanosine
  modified_base 30: mod_base = OTHER; note = 2'-O-Methyl-cytidine
  modified_base 31: mod_base = OTHER; note = 2'-O-Methyl-uridine
  modified_base 32: mod_base = OTHER; note = 2'-O-Methyl-adenosine
  modified_base 33: mod_base = OTHER; note = 2'-O-Methyl-guanosine
  modified_base 34: mod_base = OTHER; note = 2'-O-Methyl-adenosine
  modified_base 35: mod_base = OTHER; note = 2'-O-Methyl-adenosine
  modified_base 36: mod_base = OTHER; note = 2'-O-Methyl-adenosine
  modified_base 37: mod_base = OTHER; note = 2'-O-Methyl-uridine
  modified_base 38: mod_base = OTHER; note = 2'-O-Methyl-adenosine
  modified_base 39: mod_base = OTHER; note = 2'-O-Methyl-guanosine
  modified_base 40: mod_base = OTHER; note = 2'-O-Methyl-cytidine
  modified_base 41: mod_base = OTHER; note = 2'-O-Methyl-adenosine
  modified_base 42: mod_base = OTHER; note = 2'-O-Methyl-adenosine
  modified_base 46: mod_base = OTHER; note = 2'-O-Methyl-adenosine
  modified_base 48: mod_base = OTHER; note = 2'-O-Methyl-adenosine
  modified_base 50: mod_base = OTHER; note = 2'-O-Methyl-uridine
  modified_base 52: mod_base = OTHER; note = 2'-O-Methyl-adenosine
  modified_base 53: mod_base = OTHER; note = 2'-O-Methyl-guanosine
  modified_base 54: mod_base = OTHER; note = 2'-O-Methyl-guanosine
  modified_base 55: mod_base = OTHER; note = 2'-O-Methyl-cytidine
  modified_base 56: mod_base = OTHER; note = 2'-O-Methyl-uridine
  modified_base 57: mod_base = OTHER; note = 2'-O-Methyl-adenosine
  modified_base 60: mod_base = OTHER; note = 2'-O-Methyl-cytidine
  modified_base 61: mod_base = OTHER; note = 2'-O-Methyl-cytidine
  modified_base 66: mod_base = OTHER; note = 2'-O-Methyl-uridine
  modified_base 67: mod_base = OTHER; note = 2'-O-Methyl-cytidine
  modified_base 70: mod_base = OTHER; note = 2'-O-Methyl-cytidine
  modified_base 71: mod_base = OTHER; note = 2'-O-Methyl-uridine
  modified_base 72: mod_base = OTHER; note = 2'-O-Methyl-uridine
  modified_base 73: mod_base = OTHER; note = 2'-O-Methyl-guanosine
  modified_base 74: mod_base = OTHER; note = 2'-O-Methyl-adenosine
  modified_base 75: mod_base = OTHER; note = 2'-O-Methyl-adenosine
  modified_base 76: mod_base = OTHER; note = 2'-O-Methyl-adenosine
  modified_base 77: mod_base = OTHER; note = 2'-O-Methyl-adenosine
  modified_base 78: mod_base = OTHER; note = 2'-O-Methyl-adenosine
  modified_base 79: mod_base = OTHER; note = 2'-O-Methyl-guanosine
  modified_base 80: mod_base = OTHER; note = 2'-O-Methyl-uridine
  modified_base 81: mod_base = OTHER; note = 2'-O-Methyl-guanosine
  modified_base 83: mod_base = OTHER; note = 2'-O-Methyl-cytidine
  modified_base 84: mod_base = OTHER; note = 2'-O-Methyl-adenosine
  modified_base 85: mod_base = OTHER; note = 2'-O-Methyl-cytidine
  modified_base 86: mod_base = OTHER; note = 2'-O-Methyl-cytidine
  modified_base 87: mod_base = OTHER; note = 2'-O-Methyl-guanosine
  modified_base 88: mod_base = OTHER; note = 2'-O-Methyl-adenosine
  modified_base 89: mod_base = OTHER; note = 2'-O-Methyl-guanosine
  modified_base 90: mod_base = OTHER; note = 2'-O-Methyl-uridine
  modified_base 91: mod_base = OTHER; note = 2'-O-Methyl-cytidine
  modified_base 92: mod_base = OTHER; note = 2'-O-Methyl-guanosine
  modified_base 93: mod_base = OTHER; note = 2'-O-Methyl-guanosine
  modified_base 94: mod_base = OTHER; note = 2'-O-Methyl-uridine
  modified_base 95: mod_base = OTHER; note = 2'-O-Methyl-guanosine
  modified_base 96: mod_base = OTHER; note = 2'-O-Methyl-cytidine
  modified_base 97: mod_base = OTHER; note = 2'-O-Methyl-uridine phosphorothioate
  modified_base 98: mod_base = OTHER; note = ribonebularine phosphorothioate
  modified_base 99: mod_base = OTHER; note = ribonebularine phosphorothioate
  modified_base 100: mod_base = OTHER; note = ribonebularine

SEQ ID NO: 3130 - RNA, 100 nt, synthetic construct; identical to SEQ ID NO: 2111
  source 1..100: mol_type = other RNA
  modified_base 1: mod_base = OTHER; note = 2'-O-Methyl-cytidine phosphorothioate
  modified_base 2: mod_base = OTHER; note = 2'-O-Methyl-adenosine phosphorothioate
  modified_base 3: mod_base = OTHER; note = 2'-O-Methyl-guanosine phosphorothioate
  modified_base 29: mod_base = OTHER; note = 2'-O-Methyl-guanosine
  modified_base 30: mod_base = OTHER; note = 2'-O-Methyl-cytidine
  modified_base 31: mod_base = OTHER; note = 2'-O-Methyl-uridine
  modified_base 32: mod_base = OTHER; note = 2'-O-Methyl-adenosine
  modified_base 33: mod_base = OTHER; note = 2'-O-Methyl-guanosine
  modified_base 34: mod_base = OTHER; note = 2'-O-Methyl-adenosine
  modified_base 35: mod_base = OTHER; note = 2'-O-Methyl-adenosine
  modified_base 36: mod_base = OTHER; note = 2'-O-Methyl-adenosine
  modified_base 37: mod_base = OTHER; note = 2'-O-Methyl-uridine
  modified_base 38: mod_base = OTHER; note = 2'-O-Methyl-adenosine
  modified_base 39: mod_base = OTHER; note = 2'-O-Methyl-guanosine
  modified_base 40: mod_base = OTHER; note = 2'-O-Methyl-cytidine
  modified_base 69: mod_base = OTHER; note = 2'-O-Methyl-adenosine
  modified_base 70: mod_base = OTHER; note = 2'-O-Methyl-cytidine
  modified_base 71: mod_base = OTHER; note = 2'-O-Methyl-uridine
  modified_base 72: mod_base = OTHER; note = 2'-O-Methyl-uridine
  modified_base 73: mod_base = OTHER; note = 2'-O-Methyl-guanosine
  modified_base 74: mod_base = OTHER; note = 2'-O-Methyl-adenosine
  modified_base 75: mod_base = OTHER; note = 2'-O-Methyl-adenosine
  modified_base 76: mod_base = OTHER; note = 2'-O-Methyl-adenosine
  modified_base 77: mod_base = OTHER; note = 2'-O-Methyl-adenosine
  modified_base 78: mod_base = OTHER; note = 2'-O-Methyl-adenosine
  modified_base 79: mod_base = OTHER; note = 2'-O-Methyl-guanosine
  modified_base 80: mod_base = OTHER; note = 2'-O-Methyl-uridine
  modified_base 81: mod_base = OTHER; note = 2'-O-Methyl-guanosine
  modified_base 82: mod_base = OTHER; note = 2'-O-Methyl-guanosine
  modified_base 83: mod_base = OTHER; note = 2'-O-Methyl-cytidine
  modified_base 84: mod_base = OTHER; note = 2'-O-Methyl-adenosine
  modified_base 85: mod_base = OTHER; note = 2'-O-Methyl-cytidine
  modified_base 86: mod_base = OTHER; note = 2'-O-Methyl-cytidine
  modified_base 87: mod_base = OTHER; note = 2'-O-Methyl-guanosine
  modified_base 88: mod_base = OTHER; note = 2'-O-Methyl-adenosine
  modified_base 89: mod_base = OTHER; note = 2'-O-Methyl-guanosine
  modified_base 90: mod_base = OTHER; note = 2'-O-Methyl-uridine
  modified_base 91: mod_base = OTHER; note = 2'-O-Methyl-cytidine
  modified_base 92: mod_base = OTHER; note = 2'-O-Methyl-guanosine
  modified_base 93: mod_base = OTHER; note = 2'-O-Methyl-guanosine
  modified_base 94: mod_base = OTHER; note = 2'-O-Methyl-uridine
  modified_base 95: mod_base = OTHER; note = 2'-O-Methyl-guanosine
  modified_base 96: mod_base = OTHER; note = 2'-O-Methyl-cytidine
  modified_base 97: mod_base = OTHER; note = 2'-O-Methyl-uridine phosphorothioate
  modified_base 98: mod_base = OTHER; note = 2'-O-Methyl-uridine phosphorothioate
  modified_base 99: mod_base = OTHER; note = ribonebularine phosphorothioate
  modified_base 100: mod_base = OTHER; note = ribonebularine

SEQ ID NO: 3131 - RNA, 100 nt, synthetic construct; identical to SEQ ID NO: 2111
  source 1..100: mol_type = other RNA
  modified_base 1: mod_base = OTHER; note = 2'-O-Methyl-cytidine phosphorothioate
  modified_base 2: mod_base = OTHER; note = 2'-O-Methyl-adenosine phosphorothioate
  modified_base 3: mod_base = OTHER; note = 2'-O-Methyl-guanosine phosphorothioate
  modified_base 21: mod_base = OTHER; note = 2'-O-Methyl-guanosine
  modified_base 28: mod_base = OTHER; note = 2'-O-Methyl-adenosine
  modified_base 29: mod_base = OTHER; note = 2'-O-Methyl-guanosine
  modified_base 30: mod_base = OTHER; note = 2'-O-Methyl-cytidine
  modified_base 31: mod_base = OTHER; note = 2'-O-Methyl-uridine
  modified_base 32: mod_base = OTHER; note = 2'-O-Methyl-adenosine
  modified_base 34: mod_base = OTHER; note = 2'-O-Methyl-adenosine
  modified_base 35: mod_base = OTHER; note = 2'-O-Methyl-adenosine
  modified_base 36: mod_base = OTHER; note = 2'-O-Methyl-adenosine
  modified_base 37: mod_base = OTHER; note = 2'-O-Methyl-uridine
  modified_base 38: mod_base = OTHER; note = 2'-O-Methyl-adenosine
  modified_base 39: mod_base = OTHER; note = 2'-O-Methyl-guanosine
  modified_base 40: mod_base = OTHER; note = 2'-O-Methyl-cytidine
  modified_base 41: mod_base = OTHER; note = 2'-O-Methyl-adenosine
  modified_base 42: mod_base = OTHER; note = 2'-O-Methyl-adenosine
  modified_base 46: mod_base = OTHER; note = 2'-O-Methyl-adenosine
  modified_base 48: mod_base = OTHER; note = 2'-O-Methyl-adenosine
  modified_base 50: mod_base = OTHER; note = 2'-O-Methyl-uridine
  modified_base 52: mod_base = OTHER; note = 2'-O-Methyl-adenosine
  modified_base 53: mod_base = OTHER; note = 2'-O-Methyl-guanosine
  modified_base 54: mod_base = OTHER; note = 2'-O-Methyl-guanosine
  modified_base 57: mod_base = OTHER; note = 2'-O-Methyl-adenosine
  modified_base 61: mod_base = OTHER; note = 2'-O-Methyl-cytidine
  modified_base 66: mod_base = OTHER; note = 2'-O-Methyl-uridine
  modified_base 67: mod_base = OTHER; note = 2'-O-Methyl-cytidine
  modified_base 70: mod_base = OTHER; note = 2'-O-Methyl-cytidine
  modified_base 71: mod_base = OTHER; note = 2'-O-Methyl-uridine
  modified_base 72: mod_base = OTHER; note = 2'-O-Methyl-uridine
  modified_base 74: mod_base = OTHER; note = 2'-O-Methyl-adenosine
  modified_base 75: mod_base = OTHER; note = 2'-O-Methyl-adenosine
  modified_base 76: mod_base = OTHER; note = 2'-O-Methyl-adenosine
  modified_base 77: mod_base = OTHER; note = 2'-O-Methyl-adenosine
  modified_base 78: mod_base = OTHER; note = 2'-O-Methyl-adenosine
  modified_base 79: mod_base = OTHER; note = 2'-O-Methyl-guanosine
  modified_base 80: mod_base = OTHER; note = 2'-O-Methyl-uridine
  modified_base 82: mod_base = OTHER; note = 2'-O-Methyl-guanosine
  modified_base 83: mod_base = OTHER; note = 2'-O-Methyl-cytidine
  modified_base 84: mod_base = OTHER; note = 2'-O-Methyl-adenosine
  modified_base 85: mod_base = OTHER; note = 2'-O-Methyl-cytidine
  modified_base 86: mod_base = OTHER; note = 2'-O-Methyl-cytidine
  modified_base 87: mod_base = OTHER; note = 2'-O-Methyl-guanosine
  modified_base 89: mod_base = OTHER; note = 2'-O-Methyl-guanosine
  modified_base 92: mod_base = OTHER; note = 2'-O-Methyl-guanosine
  modified_base 93: mod_base = OTHER; note = 2'-O-Methyl-guanosine
  modified_base 94: mod_base = OTHER; note = 2'-O-Methyl-uridine
  modified_base 95: mod_base = OTHER; note = 2'-O-Methyl-guanosine
  modified_base 96: mod_base = OTHER; note = 2'-O-Methyl-cytidine
  modified_base 97: mod_base = OTHER; note = 2'-O-Methyl-uridine phosphorothioate
  modified_base 98: mod_base = OTHER; note = 2'-O-Methyl-uridine phosphorothioate
  modified_base 99: mod_base = OTHER; note = ribonebularine phosphorothioate
  modified_base 100: mod_base = OTHER; note = ribonebularine

SEQ ID NO: 3132 - RNA, 100 nt, synthetic construct; identical to SEQ ID NO: 2111
  source 1..100: mol_type = other RNA
  modified_base 1: mod_base = OTHER; note = 2'-O-Methyl-cytidine phosphorothioate
  modified_base 2: mod_base = OTHER; note = 2'-O-Methyl-adenosine phosphorothioate
  modified_base 3: mod_base = OTHER; note = 2'-O-Methyl-guanosine phosphorothioate
  modified_base 21: mod_base = OTHER; note = 2'-O-Methyl-guanosine
  modified_base 28: mod_base = OTHER; note = 2'-O-Methyl-adenosine
  modified_base 29: mod_base = OTHER; note = 2'-O-Methyl-guanosine
  modified_base 30: mod_base = OTHER; note = 2'-O-Methyl-cytidine
  modified_base 31: mod_base = OTHER; note = 2'-O-Methyl-uridine
  modified_base 32: mod_base = OTHER; note = 2'-O-Methyl-adenosine
  modified_base 33: mod_base = OTHER; note = 2'-O-Methyl-guanosine
  modified_base 34: mod_base = OTHER; note = 2'-O-Methyl-adenosine
  modified_base 35: mod_base = OTHER; note = 2'-O-Methyl-adenosine
  modified_base 36: mod_base = OTHER; note = 2'-O-Methyl-adenosine
  modified_base 37: mod_base = OTHER; note = 2'-O-Methyl-uridine
  modified_base 38: mod_base = OTHER; note = 2'-O-Methyl-adenosine
  modified_base 39: mod_base = OTHER; note = 2'-O-Methyl-guanosine
  modified_base 40: mod_base = OTHER; note = 2'-O-Methyl-cytidine
  modified_base 41: mod_base = OTHER; note = 2'-O-Methyl-adenosine
  modified_base 42: mod_base = OTHER; note = 2'-O-Methyl-adenosine
  modified_base 46: mod_base = OTHER; note = 2'-O-Methyl-adenosine
  modified_base 48: mod_base = OTHER; note = 2'-O-Methyl-adenosine
  modified_base 50: mod_base = OTHER; note = 2'-O-Methyl-uridine
  modified_base 52: mod_base = OTHER; note = 2'-O-Methyl-adenosine
  modified_base 53: mod_base = OTHER; note = 2'-O-Methyl-guanosine
  modified_base 54: mod_base = OTHER; note = 2'-O-Methyl-guanosine
  modified_base 55: mod_base = OTHER; note = 2'-O-Methyl-cytidine
  modified_base 56: mod_base = OTHER; note = 2'-O-Methyl-uridine
  modified_base 57: mod_base = OTHER; note = 2'-O-Methyl-adenosine
  modified_base 60: mod_base = OTHER; note = 2'-O-Methyl-cytidine
  modified_base 61: mod_base = OTHER; note = 2'-O-Methyl-cytidine
  modified_base 66: mod_base = OTHER; note = 2'-O-Methyl-uridine
  modified_base 67: mod_base = OTHER; note = 2'-O-Methyl-cytidine
  modified_base 70: mod_base = OTHER; note = 2'-O-Methyl-cytidine
  modified_base 71: mod_base = OTHER; note = 2'-O-Methyl-uridine
  modified_base 72: mod_base = OTHER; note = 2'-O-Methyl-uridine
  modified_base 73: mod_base = OTHER; note = 2'-O-Methyl-guanosine
  modified_base 74: mod_base = OTHER; note = 2'-O-Methyl-adenosine
  modified_base 75: mod_base = OTHER; note = 2'-O-Methyl-adenosine
  modified_base 76: mod_base = OTHER; note = 2'-O-Methyl-adenosine
  modified_base 77: mod_base = OTHER; note = 2'-O-Methyl-adenosine
  modified_base 78: mod_base = OTHER; note = 2'-O-Methyl-adenosine
  modified_base 79: mod_base = OTHER; note = 2'-O-Methyl-guanosine
  modified_base 80: mod_base = OTHER; note = 2'-O-Methyl-uridine
  modified_base 81: mod_base = OTHER; note = 2'-O-Methyl-guanosine
  modified_base 83: mod_base = OTHER; note = 2'-O-Methyl-cytidine
  modified_base 84: mod_base = OTHER; note = 2'-O-Methyl-adenosine
  modified_base 85: mod_base = OTHER; note = 2'-O-Methyl-cytidine
  modified_base 86: mod_base = OTHER; note = 2'-O-Methyl-cytidine
  modified_base 87: mod_base = OTHER; note = 2'-O-Methyl-guanosine
  modified_base 88: mod_base = OTHER; note = 2'-O-Methyl-adenosine
  modified_base 89: mod_base = OTHER; note = 2'-O-Methyl-guanosine
  modified_base 90: mod_base = OTHER; note = 2'-O-Methyl-uridine
  modified_base 91: mod_base = OTHER; note = 2'-O-Methyl-cytidine
  modified_base 92: mod_base = OTHER; note = 2'-O-Methyl-guanosine
  modified_base 93: mod_base = OTHER; note = 2'-O-Methyl-guanosine
  modified_base 94: mod_base = OTHER; note = 2'-O-Methyl-uridine
  modified_base 95: mod_base = OTHER; note = 2'-O-Methyl-guanosine
  modified_base 96: mod_base = OTHER; note = 2'-O-Methyl-cytidine
  modified_base 97: mod_base = OTHER; note = 2'-O-Methyl-uridine phosphorothioate
  modified_base 98: mod_base = OTHER; note = 2'-O-Methyl-uridine phosphorothioate
  modified_base 99: mod_base = OTHER; note = ribonebularine phosphorothioate
  modified_base 100: mod_base = OTHER; note = ribonebularine

SEQ ID NO: 3133 - RNA, 100 nt, synthetic construct; identical to SEQ ID NO: 2113
  source 1..100: mol_type = other RNA
  modified_base 1: mod_base = OTHER; note = 2'-O-Methyl-cytidine phosphorothioate
  modified_base 2: mod_base = OTHER; note = 2'-O-Methyl-adenosine phosphorothioate
  modified_base 3: mod_base = OTHER; note = 2'-O-Methyl-guanosine phosphorothioate
  modified_base 29: mod_base = OTHER; note = 2'-O-Methyl-guanosine
  modified_base 30: mod_base = OTHER; note = 2'-O-Methyl-cytidine
  modified_base 31: mod_base = OTHER; note = 2'-O-Methyl-uridine
  modified_base 32: mod_base = OTHER; note = 2'-O-Methyl-adenosine
  modified_base 33: mod_base = OTHER; note = 2'-O-Methyl-guanosine
  modified_base 34: mod_base = OTHER; note = 2'-O-Methyl-adenosine
  modified_base 35: mod_base = OTHER; note = 2'-O-Methyl-adenosine
  modified_base 36: mod_base = OTHER; note = 2'-O-Methyl-adenosine
  modified_base 37: mod_base = OTHER; note = 2'-O-Methyl-uridine
  modified_base 38: mod_base = OTHER; note = 2'-O-Methyl-adenosine
  modified_base 39: mod_base = OTHER; note = 2'-O-Methyl-guanosine
  modified_base 40: mod_base = OTHER; note = 2'-O-Methyl-cytidine
  modified_base 69: mod_base = OTHER; note = 2'-O-Methyl-adenosine
  modified_base 70: mod_base = OTHER; note = 2'-O-Methyl-cytidine
  modified_base 71: mod_base = OTHER; note = 2'-O-Methyl-uridine
  modified_base 72: mod_base = OTHER; note = 2'-O-Methyl-uridine
  modified_base 73: mod_base = OTHER; note = 2'-O-Methyl-guanosine
  modified_base 74: mod_base = OTHER; note = 2'-O-Methyl-adenosine
  modified_base 75: mod_base = OTHER; note = 2'-O-Methyl-adenosine
  modified_base 76: mod_base = OTHER; note = 2'-O-Methyl-adenosine
  modified_base 77: mod_base = OTHER; note = 2'-O-Methyl-adenosine
  modified_base 78: mod_base = OTHER; note = 2'-O-Methyl-adenosine
  modified_base 79: mod_base = OTHER; note = 2'-O-Methyl-guanosine
  modified_base 80: mod_base = OTHER; note = 2'-O-Methyl-uridine
  modified_base 81: mod_base = OTHER; note = 2'-O-Methyl-guanosine
  modified_base 82: mod_base = OTHER; note = 2'-O-Methyl-guanosine
  modified_base 83: mod_base = OTHER; note = 2'-O-Methyl-cytidine
  modified_base 84: mod_base = OTHER; note = 2'-O-Methyl-adenosine
  modified_base 85: mod_base = OTHER; note = 2'-O-Methyl-cytidine
  modified_base 86: mod_base = OTHER; note = 2'-O-Methyl-cytidine
  modified_base 87: mod_base = OTHER; note = 2'-O-Methyl-guanosine
  modified_base 88: mod_base = OTHER; note = 2'-O-Methyl-adenosine
  modified_base 89: mod_base = OTHER; note = 2'-O-Methyl-guanosine
  modified_base 90: mod_base = OTHER; note = 2'-O-Methyl-uridine
  modified_base 91: mod_base = OTHER; note = 2'-O-Methyl-cytidine
  modified_base 92: mod_base = OTHER; note = 2'-O-Methyl-guanosine
  modified_base 93: mod_base = OTHER; note = 2'-O-Methyl-guanosine
  modified_base 94: mod_base = OTHER; note = 2'-O-Methyl-uridine
  modified_base 95: mod_base = OTHER; note = 2'-O-Methyl-guanosine
  modified_base 96: mod_base = OTHER; note = 2'-O-Methyl-cytidine
  modified_base 97: mod_base = OTHER; note = 2'-O-Methyl-uridine phosphorothioate
  modified_base 98: mod_base = OTHER; note = 2'-O-Methyl-uridine phosphorothioate
  modified_base 99: mod_base = OTHER; note = 2'-O-Methyl-uridine phosphorothioate
  modified_base 100: mod_base = OTHER; note = ribonebularine

SEQ ID NO: 3134 - RNA, 100 nt, synthetic construct; identical to SEQ ID NO: 2113
  source 1..100: mol_type = other RNA
  modified_base 1: mod_base = OTHER; note = 2'-O-Methyl-cytidine phosphorothioate
  modified_base 2: mod_base = OTHER; note = 2'-O-Methyl-adenosine phosphorothioate
  modified_base 3: mod_base = OTHER; note = 2'-O-Methyl-guanosine phosphorothioate
  modified_base 21: mod_base = OTHER; note = 2'-O-Methyl-guanosine
  modified_base 28: mod_base = OTHER; note = 2'-O-Methyl-adenosine
  modified_base 29: mod_base = OTHER; note = 2'-O-Methyl-guanosine
  modified_base 30: mod_base = OTHER; note = 2'-O-Methyl-cytidine
  modified_base 31: mod_base = OTHER; note = 2'-O-Methyl-uridine
  modified_base 32: mod_base = OTHER; note = 2'-O-Methyl-adenosine
  modified_base 34: mod_base = OTHER; note = 2'-O-Methyl-adenosine
  modified_base 35: mod_base = OTHER; note = 2'-O-Methyl-adenosine
  modified_base 36: mod_base = OTHER; note = 2'-O-Methyl-adenosine
  modified_base 37: mod_base = OTHER; note = 2'-O-Methyl-uridine
  modified_base 38: mod_base = OTHER; note = 2'-O-Methyl-adenosine
  modified_base 39: mod_base = OTHER; note = 2'-O-Methyl-guanosine
  modified_base 40: mod_base = OTHER; note = 2'-O-Methyl-cytidine
  modified_base 41: mod_base = OTHER; note = 2'-O-Methyl-adenosine
  modified_base 42: mod_base = OTHER; note = 2'-O-Methyl-adenosine
  modified_base 46: mod_base = OTHER; note = 2'-O-Methyl-adenosine
  modified_base 48: mod_base = OTHER; note = 2'-O-Methyl-adenosine
  modified_base 50: mod_base = OTHER; note = 2'-O-Methyl-uridine
  modified_base 52: mod_base = OTHER; note = 2'-O-Methyl-adenosine
  modified_base 53: mod_base = OTHER; note = 2'-O-Methyl-guanosine
  modified_base 54: mod_base = OTHER; note = 2'-O-Methyl-guanosine
  modified_base 57: mod_base = OTHER; note = 2'-O-Methyl-adenosine
  modified_base 61: mod_base = OTHER; note = 2'-O-Methyl-cytidine
  modified_base 66: mod_base = OTHER; note = 2'-O-Methyl-uridine
  modified_base 67: mod_base = OTHER; note = 2'-O-Methyl-cytidine
  modified_base 70: mod_base = OTHER; note = 2'-O-Methyl-cytidine
  modified_base 71: mod_base = OTHER; note = 2'-O-Methyl-uridine
  modified_base 72: mod_base = OTHER; note = 2'-O-Methyl-uridine
  modified_base 74: mod_base = OTHER; note = 2'-O-Methyl-adenosine
  modified_base 75: mod_base = OTHER; note = 2'-O-Methyl-adenosine
  modified_base 76: mod_base = OTHER; note = 2'-O-Methyl-adenosine
  modified_base 77: mod_base = OTHER; note = 2'-O-Methyl-adenosine
  modified_base 78: mod_base = OTHER; note = 2'-O-Methyl-adenosine
  modified_base 79: mod_base = OTHER; note = 2'-O-Methyl-guanosine
  modified_base 80: mod_base = OTHER; note = 2'-O-Methyl-uridine
  modified_base 82: mod_base = OTHER; note = 2'-O-Methyl-guanosine
  modified_base 83: mod_base = OTHER; note = 2'-O-Methyl-cytidine
  modified_base 84: mod_base = OTHER; note = 2'-O-Methyl-adenosine
  modified_base 85: mod_base = OTHER; note = 2'-O-Methyl-cytidine
  modified_base 86: mod_base = OTHER; note = 2'-O-Methyl-cytidine
  modified_base 87: mod_base = OTHER; note = 2'-O-Methyl-guanosine
  modified_base 89: mod_base = OTHER; note = 2'-O-Methyl-guanosine
  modified_base 92: mod_base = OTHER; note = 2'-O-Methyl-guanosine
  modified_base 93: mod_base = OTHER; note = 2'-O-Methyl-guanosine
  modified_base 94: mod_base = OTHER; note = 2'-O-Methyl-uridine
  modified_base 95: mod_base = OTHER; note = 2'-O-Methyl-guanosine
  modified_base 96: mod_base = OTHER; note = 2'-O-Methyl-cytidine
  modified_base 97: mod_base = OTHER; note = 2'-O-Methyl-uridine phosphorothioate
  modified_base 98: mod_base = OTHER; note = 2'-O-Methyl-uridine phosphorothioate
  modified_base 99: mod_base = OTHER; note = 2'-O-Methyl-uridine phosphorothioate
  modified_base 100: mod_base = OTHER; note = ribonebularine

SEQ ID NO: 3135 - RNA, 100 nt, synthetic construct; identical to SEQ ID NO: 2113
  source 1..100: mol_type = other RNA
  modified_base 1: mod_base = OTHER; note = 2'-O-Methyl-cytidine phosphorothioate
  modified_base 2: mod_base = OTHER; note = 2'-O-Methyl-adenosine phosphorothioate
  modified_base 3: mod_base = OTHER; note = 2'-O-Methyl-guanosine phosphorothioate
  modified_base 21: mod_base = OTHER; note = 2'-O-Methyl-guanosine
  modified_base 28: mod_base = OTHER; note = 2'-O-Methyl-adenosine
  modified_base 29: mod_base = OTHER; note = 2'-O-Methyl-guanosine
  modified_base 30: mod_base = OTHER; note = 2'-O-Methyl-cytidine
  modified_base 31: mod_base = OTHER; note = 2'-O-Methyl-uridine
  modified_base 32: mod_base = OTHER; note = 2'-O-Methyl-adenosine
  modified_base 33: mod_base = OTHER; note = 2'-O-Methyl-guanosine
  modified_base 34: mod_base = OTHER; note = 2'-O-Methyl-adenosine
  modified_base 35: mod_base = OTHER; note = 2'-O-Methyl-adenosine
  modified_base 36: mod_base = OTHER; note = 2'-O-Methyl-adenosine
  modified_base 37: mod_base = OTHER; note = 2'-O-Methyl-uridine
  modified_base 38: mod_base = OTHER; note = 2'-O-Methyl-adenosine
  modified_base 39: mod_base = OTHER; note = 2'-O-Methyl-guanosine
  modified_base 40: mod_base = OTHER; note = 2'-O-Methyl-cytidine
  modified_base 41: mod_base = OTHER; note = 2'-O-Methyl-adenosine
  modified_base 42: mod_base = OTHER; note = 2'-O-Methyl-adenosine
  modified_base 46: mod_base = OTHER; note = 2'-O-Methyl-adenosine
  modified_base 48: mod_base = OTHER; note = 2'-O-Methyl-adenosine
  modified_base 50: mod_base = OTHER; note = 2'-O-Methyl-uridine
  modified_base 52: mod_base = OTHER; note = 2'-O-Methyl-adenosine
  modified_base 53: mod_base = OTHER; note = 2'-O-Methyl-guanosine
  modified_base 54: mod_base = OTHER; note = 2'-O-Methyl-guanosine
  modified_base 55: mod_base = OTHER; note = 2'-O-Methyl-cytidine
  modified_base 56: mod_base = OTHER; note = 2'-O-Methyl-uridine
  modified_base 57: mod_base = OTHER; note = 2'-O-Methyl-adenosine
  modified_base 60: mod_base = OTHER; note = 2'-O-Methyl-cytidine
  modified_base 61: mod_base = OTHER; note = 2'-O-Methyl-cytidine
  modified_base 66: mod_base = OTHER; note = 2'-O-Methyl-uridine
  modified_base 67: mod_base = OTHER; note = 2'-O-Methyl-cytidine
  modified_base 70: mod_base = OTHER; note = 2'-O-Methyl-cytidine
  modified_base 71: mod_base = OTHER; note = 2'-O-Methyl-uridine
  modified_base 72: mod_base = OTHER; note = 2'-O-Methyl-uridine
  modified_base 73: mod_base = OTHER; note = 2'-O-Methyl-guanosine
  modified_base 74: mod_base = OTHER; note = 2'-O-Methyl-adenosine
  modified_base 75: mod_base = OTHER; note = 2'-O-Methyl-adenosine
  modified_base 76: mod_base = OTHER; note = 2'-O-Methyl-adenosine
  modified_base 77: mod_base = OTHER; note = 2'-O-Methyl-adenosine
  modified_base 78: mod_base = OTHER; note = 2'-O-Methyl-adenosine
  modified_base 79: mod_base = OTHER; note = 2'-O-Methyl-guanosine
  modified_base 80: mod_base = OTHER; note = 2'-O-Methyl-uridine
  modified_base 81: mod_base = OTHER; note = 2'-O-Methyl-guanosine
  modified_base 83: mod_base = OTHER; note = 2'-O-Methyl-cytidine
  modified_base 84: mod_base = OTHER; note = 2'-O-Methyl-adenosine
  modified_base 85: mod_base = OTHER; note = 2'-O-Methyl-cytidine
  modified_base 86: mod_base = OTHER; note = 2'-O-Methyl-cytidine
  modified_base 87: mod_base = OTHER; note = 2'-O-Methyl-guanosine
  modified_base 88: mod_base = OTHER; note = 2'-O-Methyl-adenosine
  modified_base 89: mod_base = OTHER; note = 2'-O-Methyl-guanosine
  modified_base 90: mod_base = OTHER; note = 2'-O-Methyl-uridine
  modified_base 91: mod_base = OTHER; note = 2'-O-Methyl-cytidine
  modified_base 92: mod_base = OTHER; note = 2'-O-Methyl-guanosine
  modified_base 93: mod_base = OTHER; note = 2'-O-Methyl-guanosine
  modified_base 94: mod_base = OTHER; note = 2'-O-Methyl-uridine
  modified_base 95: mod_base = OTHER; note = 2'-O-Methyl-guanosine
  modified_base 96: mod_base = OTHER; note = 2'-O-Methyl-cytidine
  modified_base 97: mod_base = OTHER; note = 2'-O-Methyl-uridine phosphorothioate
  modified_base 98: mod_base = OTHER; note = 2'-O-Methyl-uridine phosphorothioate
  modified_base 99: mod_base = OTHER; note = 2'-O-Methyl-uridine phosphorothioate
  modified_base 100: mod_base = OTHER; note = ribonebularine

SEQ ID NO: 3136 - RNA, 103 nt, synthetic construct; identical to SEQ ID NO: 1797
  source 1..103: mol_type = other RNA
  modified_base 1: mod_base = OTHER; note = 2'-O-Methyl-cytidine phosphorothioate
  modified_base 2: mod_base = OTHER; note = 2'-O-Methyl-adenosine phosphorothioate
  modified_base 3: mod_base = OTHER; note = 2'-O-Methyl-guanosine phosphorothioate
  modified_base 29: mod_base = OTHER; note = 2'-O-Methyl-guanosine
  modified_base 30: mod_base = OTHER; note = 2'-O-Methyl-cytidine
  modified_base 31: mod_base = OTHER; note = 2'-O-Methyl-uridine
  modified_base 32: mod_base = OTHER; note = 2'-O-Methyl-adenosine
  modified_base 33: mod_base = OTHER; note = 2'-O-Methyl-guanosine
  modified_base 34: mod_base = OTHER; note = 2'-O-Methyl-adenosine
  modified_base 35: mod_base = OTHER; note = 2'-O-Methyl-adenosine
  modified_base 36: mod_base = OTHER; note = 2'-O-Methyl-adenosine
  modified_base 37: mod_base = OTHER; note = 2'-O-Methyl-uridine
  modified_base 38: mod_base = OTHER; note = 2'-O-Methyl-adenosine
  modified_base 39: mod_base = OTHER; note = 2'-O-Methyl-guanosine
  modified_base 40: mod_base = OTHER; note = 2'-O-Methyl-cytidine
  modified_base 69: mod_base = OTHER; note = 2'-O-Methyl-adenosine
  modified_base 70: mod_base = OTHER; note = 2'-O-Methyl-cytidine
  modified_base 71: mod_base = OTHER; note = 2'-O-Methyl-uridine
  modified_base 72: mod_base = OTHER; note = 2'-O-Methyl-uridine
  modified_base 73: mod_base = OTHER; note = 2'-O-Methyl-guanosine
  modified_base 74: mod_base = OTHER; note = 2'-O-Methyl-adenosine
  modified_base 75: mod_base = OTHER; note = 2'-O-Methyl-adenosine
  modified_base 76: mod_base = OTHER; note = 2'-O-Methyl-adenosine
  modified_base 77: mod_base = OTHER; note = 2'-O-Methyl-adenosine
  modified_base 78: mod_base = OTHER; note = 2'-O-Methyl-adenosine
  modified_base 79: mod_base = OTHER; note = 2'-O-Methyl-guanosine
  modified_base 80: mod_base = OTHER; note = 2'-O-Methyl-uridine
  modified_base 81: mod_base = OTHER; note = 2'-O-Methyl-guanosine
  modified_base 82: mod_base = OTHER; note = 2'-O-Methyl-guanosine
  modified_base 83: mod_base = OTHER; note = 2'-O-Methyl-cytidine
  modified_base 84: mod_base = OTHER; note = 2'-O-Methyl-adenosine
  modified_base 85: mod_base = OTHER; note = 2'-O-Methyl-cytidine
  modified_base 86: mod_base = OTHER; note = 2'-O-Methyl-cytidine
  modified_base 87: mod_base = OTHER; note = 2'-O-Methyl-guanosine
  modified_base 88: mod_base = OTHER; note = 2'-O-Methyl-adenosine
  modified_base 89: mod_base = OTHER; note = 2'-O-Methyl-guanosine
  modified_base 90: mod_base = OTHER; note = 2'-O-Methyl-uridine
  modified_base 91: mod_base = OTHER; note = 2'-O-Methyl-cytidine
  modified_base 92: mod_base = OTHER; note = 2'-O-Methyl-guanosine
  modified_base 93: mod_base = OTHER; note = 2'-O-Methyl-guanosine
  modified_base 94: mod_base = OTHER; note = 2'-O-Methyl-uridine
  modified_base 95: mod_base = OTHER; note = 2'-O-Methyl-guanosine
  modified_base 96: mod_base = OTHER; note = 2'-O-Methyl-cytidine
  modified_base 97: mod_base = OTHER; note = 2'-O-Methyl-uridine phosphorothioate
  modified_base 98: mod_base = OTHER; note = 2'-O-Methyl-uridine phosphorothioate
  modified_base 99: mod_base = OTHER; note = 2'-O-Methyl-uridine phosphorothioate
  modified_base 100: mod_base = OTHER; note = 2'-O-Methyl-uridine
  misc_difference 101: note = a, c, g, inosine, u, deoxyadenosine, deoxyguanosine, deoxycytidine, deoxyinosine, thymine, ribonebularine, 2'-O-methylnebularine, or 2'-deoxynebularine
  misc_difference 102: note = a, c, g, inosine, u, deoxyadenosine, deoxyguanosine, deoxycytidine, deoxyinosine, thymine, ribonebularine, 2'-O-methylnebularine, or 2'-deoxynebularine
  misc_difference 103: note = a, c, g, inosine, u, deoxyadenosine, deoxyguanosine, deoxycytidine, deoxyinosine, thymine, ribonebularine, 2'-O-methylnebularine, or 2'-deoxynebularine

SEQ ID NO: 3137 - RNA, 103 nt, synthetic construct; identical to SEQ ID NO: 1797
  source 1..103: mol_type = other RNA
  modified_base 1: mod_base = OTHER; note = 2'-O-Methyl-cytidine phosphorothioate
  modified_base 2: mod_base = OTHER; note = 2'-O-Methyl-adenosine phosphorothioate
  modified_base 3: mod_base = OTHER; note = 2'-O-Methyl-guanosine phosphorothioate
  modified_base 21: mod_base = OTHER; note = 2'-O-Methyl-guanosine
  modified_base 28: mod_base = OTHER; note = 2'-O-Methyl-adenosine
  modified_base 29: mod_base = OTHER; note = 2'-O-Methyl-guanosine
  modified_base 30: mod_base = OTHER; note = 2'-O-Methyl-cytidine
  modified_base 31: mod_base = OTHER; note = 2'-O-Methyl-uridine
  modified_base 32: mod_base = OTHER; note = 2'-O-Methyl-adenosine
  modified_base 34: mod_base = OTHER; note = 2'-O-Methyl-adenosine
  modified_base 35: mod_base = OTHER; note = 2'-O-Methyl-adenosine
  modified_base 36: mod_base = OTHER; note = 2'-O-Methyl-adenosine
  modified_base 37: mod_base = OTHER; note = 2'-O-Methyl-uridine
  modified_base 38: mod_base = OTHER; note = 2'-O-Methyl-adenosine
  modified_base 39: mod_base = OTHER; note = 2'-O-Methyl-guanosine
  modified_base 40: mod_base = OTHER; note = 2'-O-Methyl-cytidine
  modified_base 41: mod_base = OTHER; note = 2'-O-Methyl-adenosine
  modified_base 42: mod_base = OTHER; note = 2'-O-Methyl-adenosine
  modified_base 46: mod_base = OTHER; note = 2'-O-Methyl-adenosine
  modified_base 48: mod_base = OTHER; note = 2'-O-Methyl-adenosine
  modified_base 50: mod_base = OTHER; note = 2'-O-Methyl-uridine
  modified_base 52: mod_base = OTHER; note = 2'-O-Methyl-adenosine
  modified_base 53: mod_base = OTHER; note = 2'-O-Methyl-guanosine
  modified_base 54: mod_base = OTHER; note = 2'-O-Methyl-guanosine
  modified_base 57: mod_base = OTHER; note = 2'-O-Methyl-adenosine
  modified_base 61: mod_base = OTHER; note = 2'-O-Methyl-cytidine
  modified_base 66: mod_base = OTHER; note = 2'-O-Methyl-uridine
  modified_base 67: mod_base = OTHER; note = 2'-O-Methyl-cytidine
  modified_base 70: mod_base = OTHER; note = 2'-O-Methyl-cytidine
  modified_base 71: mod_base = OTHER; note = 2'-O-Methyl-uridine
  modified_base 72: mod_base = OTHER; note = 2'-O-Methyl-uridine
  modified_base 74: mod_base = OTHER; note = 2'-O-Methyl-adenosine
  modified_base 75: mod_base = OTHER; note = 2'-O-Methyl-adenosine
  modified_base 76: mod_base = OTHER; note = 2'-O-Methyl-adenosine
  modified_base 77: mod_base = OTHER; note = 2'-O-Methyl-adenosine
  modified_base 78: mod_base = OTHER; note = 2'-O-Methyl-adenosine
  modified_base 79: mod_base = OTHER; note = 2'-O-Methyl-guanosine
  modified_base 80: mod_base = OTHER; note = 2'-O-Methyl-uridine
  modified_base 82: mod_base = OTHER; note = 2'-O-Methyl-guanosine
  modified_base 83: mod_base = OTHER; note = 2'-O-Methyl-cytidine
  modified_base 84: mod_base = OTHER; note = 2'-O-Methyl-adenosine
  modified_base 85: mod_base = OTHER; note = 2'-O-Methyl-cytidine
  modified_base 86: mod_base = OTHER; note = 2'-O-Methyl-cytidine
  modified_base 87: mod_base = OTHER; note = 2'-O-Methyl-guanosine
  modified_base 89: mod_base = OTHER; note = 2'-O-Methyl-guanosine
  modified_base 92: mod_base = OTHER; note = 2'-O-Methyl-guanosine
  modified_base 93: mod_base = OTHER; note = 2'-O-Methyl-guanosine
  modified_base 94: mod_base = OTHER; note = 2'-O-Methyl-uridine
  modified_base 95: mod_base = OTHER; note = 2'-O-Methyl-guanosine
  modified_base 96: mod_base = OTHER; note = 2'-O-Methyl-cytidine
  modified_base 97: mod_base = OTHER; note = 2'-O-Methyl-uridine phosphorothioate
  modified_base 98: mod_base = OTHER; note = 2'-O-Methyl-uridine phosphorothioate
  modified_base 99: mod_base = OTHER; note = 2'-O-Methyl-uridine phosphorothioate
  modified_base 100: mod_base = OTHER; note = 2'-O-Methyl-uridine
  misc_difference 101: note = a, c, g, inosine, u, deoxyadenosine, deoxyguanosine, deoxycytidine, deoxyinosine, thymine, ribonebularine, 2'-O-methylnebularine, or 2'-deoxynebularine
  misc_difference 102: note = a, c, g, inosine, u, deoxyadenosine, deoxyguanosine, deoxycytidine, deoxyinosine, thymine, ribonebularine, 2'-O-methylnebularine, or 2'-deoxynebularine
  misc_difference 103: note = a, c, g, inosine, u, deoxyadenosine, deoxyguanosine, deoxycytidine, deoxyinosine, thymine, ribonebularine, 2'-O-methylnebularine, or 2'-deoxynebularine

SEQ ID NO: 3138 - RNA, 103 nt, synthetic construct; identical to SEQ ID NO: 1797
  source 1..103: mol_type = other RNA
  modified_base 1: mod_base = OTHER; note = 2'-O-Methyl-cytidine phosphorothioate
  modified_base 2: mod_base = OTHER; note = 2'-O-Methyl-adenosine phosphorothioate
  modified_base 3: mod_base = OTHER; note = 2'-O-Methyl-guanosine phosphorothioate
  modified_base 21: mod_base = OTHER; note = 2'-O-Methyl-guanosine
  modified_base 28: mod_base = OTHER; note = 2'-O-Methyl-adenosine
  modified_base 29: mod_base = OTHER; note = 2'-O-Methyl-guanosine
  modified_base 30: mod_base = OTHER; note = 2'-O-Methyl-cytidine
  modified_base 31: mod_base = OTHER; note = 2'-O-Methyl-uridine
  modified_base 32: mod_base = OTHER; note = 2'-O-Methyl-adenosine
  modified_base 33: mod_base = OTHER; note = 2'-O-Methyl-guanosine
  modified_base 34: mod_base = OTHER; note = 2'-O-Methyl-adenosine
  modified_base 35: mod_base = OTHER; note = 2'-O-Methyl-adenosine
  modified_base 36: mod_base = OTHER; note = 2'-O-Methyl-adenosine
  modified_base 37: mod_base = OTHER; note = 2'-O-Methyl-uridine
  modified_base 38: mod_base = OTHER; note = 2'-O-Methyl-adenosine
  modified_base 39: mod_base = OTHER; note = 2'-O-Methyl-guanosine
  modified_base 40: mod_base = OTHER; note = 2'-O-Methyl-cytidine
  modified_base 41: mod_base = OTHER; note = 2'-O-Methyl-adenosine
  modified_base 42: mod_base = OTHER; note = 2'-O-Methyl-adenosine
  modified_base 46: mod_base = OTHER; note = 2'-O-Methyl-adenosine
  modified_base 48: mod_base = OTHER; note = 2'-O-Methyl-adenosine
  modified_base 50: mod_base = OTHER; note = 2'-O-Methyl-uridine
  modified_base 52: mod_base = OTHER; note = 2'-O-Methyl-adenosine
  modified_base 53: mod_base = OTHER; note = 2'-O-Methyl-guanosine
  modified_base 54: mod_base = OTHER; note = 2'-O-Methyl-guanosine
  modified_base 55: mod_base = OTHER; note = 2'-O-Methyl-cytidine
  modified_base 56: mod_base = OTHER; note = 2'-O-Methyl-uridine
  modified_base 57: mod_base = OTHER; note = 2'-O-Methyl-adenosine
  modified_base 60: mod_base = OTHER; note = 2'-O-Methyl-cytidine
  modified_base 61: mod_base = OTHER; note = 2'-O-Methyl-cytidine
  modified_base 66: mod_base = OTHER; note = 2'-O-Methyl-uridine
  modified_base 67: mod_base = OTHER; note = 2'-O-Methyl-cytidine
  modified_base 70: mod_base = OTHER; note = 2'-O-Methyl-cytidine
  modified_base 71: mod_base = OTHER; note = 2'-O-Methyl-uridine
  modified_base 72: mod_base = OTHER; note = 2'-O-Methyl-uridine
  modified_base 73: mod_base = OTHER; note = 2'-O-Methyl-guanosine
  modified_base 74: mod_base = OTHER; note = 2'-O-Methyl-adenosine
  modified_base 75: mod_base = OTHER; note = 2'-O-Methyl-adenosine
  modified_base 76: mod_base = OTHER; note = 2'-O-Methyl-adenosine
  modified_base 77: mod_base = OTHER; note = 2'-O-Methyl-adenosine
  modified_base 78: mod_base = OTHER; note = 2'-O-Methyl-adenosine
  modified_base 79: mod_base = OTHER; note = 2'-O-Methyl-guanosine
  modified_base 80: mod_base = OTHER; note = 2'-O-Methyl-uridine
  modified_base 81: mod_base = OTHER; note = 2'-O-Methyl-guanosine
  modified_base 83: mod_base = OTHER; note = 2'-O-Methyl-cytidine
  modified_base 84: mod_base = OTHER; note = 2'-O-Methyl-adenosine
  modified_base 85: mod_base = OTHER; note = 2'-O-Methyl-cytidine
  modified_base 86: mod_base = OTHER; note = 2'-O-Methyl-cytidine
  modified_base 87: mod_base = OTHER; note = 2'-O-Methyl-guanosine
  modified_base 88: mod_base = OTHER; note = 2'-O-Methyl-adenosine
  modified_base 89: mod_base = OTHER; note = 2'-O-Methyl-guanosine
  modified_base 90: mod_base = OTHER; note = 2'-O-Methyl-uridine
  modified_base 91: mod_base = OTHER; note = 2'-O-Methyl-cytidine
  modified_base 92: mod_base = OTHER; note = 2'-O-Methyl-guanosine
  modified_base 93: mod_base = OTHER; note = 2'-O-Methyl-guanosine
  modified_base 94: mod_base = OTHER; note = 2'-O-Methyl-uridine
  modified_base 95: mod_base = OTHER; note = 2'-O-Methyl-guanosine
  modified_base 96: mod_base = OTHER; note = 2'-O-Methyl-cytidine
  modified_base 97: mod_base = OTHER; note = 2'-O-Methyl-uridine phosphorothioate
  modified_base 98: mod_base = OTHER; note = 2'-O-Methyl-uridine phosphorothioate
  modified_base 99: mod_base = OTHER; note = 2'-O-Methyl-uridine phosphorothioate
  modified_base 100: mod_base = OTHER; note = 2'-O-Methyl-uridine
  misc_difference 101: note = a, c, g, inosine, u, deoxyadenosine, deoxyguanosine, deoxycytidine, deoxyinosine, thymine, ribonebularine, 2'-O-methylnebularine, or 2'-deoxynebularine
  misc_difference 102: note = a, c, g, inosine, u, deoxyadenosine, deoxyguanosine, deoxycytidine, deoxyinosine, thymine, ribonebularine, 2'-O-methylnebularine, or 2'-deoxynebularine
  misc_difference 103: note = a, c, g, inosine, u, deoxyadenosine, deoxyguanosine, deoxycytidine, deoxyinosine, thymine, ribonebularine, 2'-O-methylnebularine, or 2'-deoxynebularine

SEQ ID NO: 3139 - RNA, 103 nt, synthetic construct; identical to SEQ ID NO: 1797
  source 1..103: mol_type = other RNA
  modified_base 1: mod_base = OTHER; note = 2'-O-Methyl-cytidine phosphorothioate
  modified_base 2: mod_base = OTHER; note = 2'-O-Methyl-adenosine phosphorothioate
  modified_base 3: mod_base = OTHER; note = 2'-O-Methyl-guanosine phosphorothioate
  modified_base 29: mod_base = OTHER; note = 2'-O-Methyl-guanosine
  modified_base 30: mod_base = OTHER; note = 2'-O-Methyl-cytidine
  modified_base 31: mod_base = OTHER; note = 2'-O-Methyl-uridine
  modified_base 32: mod_base = OTHER; note = 2'-O-Methyl-adenosine
  modified_base 33: mod_base = OTHER; note = 2'-O-Methyl-guanosine
  modified_base 34: mod_base = OTHER; note = 2'-O-Methyl-adenosine
  modified_base 35: mod_base = OTHER; note = 2'-O-Methyl-adenosine
  modified_base 36: mod_base = OTHER; note = 2'-O-Methyl-adenosine
  modified_base 37: mod_base = OTHER; note = 2'-O-Methyl-uridine
  modified_base 38: mod_base = OTHER; note = 2'-O-Methyl-adenosine
  modified_base 39: mod_base = OTHER; note = 2'-O-Methyl-guanosine
  modified_base 40: mod_base = OTHER; note = 2'-O-Methyl-cytidine
  modified_base 69: mod_base = OTHER; note = 2'-O-Methyl-adenosine
  modified_base 70: mod_base = OTHER; note = 2'-O-Methyl-cytidine
  modified_base 71: mod_base = OTHER; note = 2'-O-Methyl-uridine
  modified_base 72: mod_base = OTHER; note = 2'-O-Methyl-uridine
  modified_base 73: mod_base = OTHER; note = 2'-O-Methyl-guanosine
  modified_base 74: mod_base = OTHER; note = 2'-O-Methyl-adenosine
  modified_base 75: mod_base = OTHER; note = 2'-O-Methyl-adenosine
  modified_base 76: mod_base = OTHER; note = 2'-O-Methyl-adenosine
  modified_base 77: mod_base = OTHER; note = 2'-O-Methyl-adenosine
  modified_base 78: mod_base = OTHER; note = 2'-O-Methyl-adenosine
  modified_base 79: mod_base = OTHER; note = 2'-O-Methyl-guanosine
  modified_base 80: mod_base = OTHER; note = 2'-O-Methyl-uridine
  modified_base 81: mod_base = OTHER; note = 2'-O-Methyl-guanosine
  modified_base 82: mod_base = OTHER; note = 2'-O-Methyl-guanosine
  modified_base 83: mod_base = OTHER; note = 2'-O-Methyl-cytidine
  modified_base 84: mod_base = OTHER; note = 2'-O-Methyl-adenosine
  modified_base 85: mod_base = OTHER; note = 2'-O-Methyl-cytidine
  modified_base 86: mod_base = OTHER; note = 2'-O-Methyl-cytidine
  modified_base 87: mod_base = OTHER; note = 2'-O-Methyl-guanosine
  modified_base 88: mod_base = OTHER; note = 2'-O-Methyl-adenosine
  modified_base 89: mod_base = OTHER; note = 2'-O-Methyl-guanosine
  modified_base 90: mod_base = OTHER; note = 2'-O-Methyl-uridine
  modified_base 91: mod_base = OTHER; note = 2'-O-Methyl-cytidine
  modified_base 92: mod_base = OTHER; note = 2'-O-Methyl-guanosine
  modified_base 93: mod_base = OTHER; note = 2'-O-Methyl-guanosine
  modified_base 94: mod_base = OTHER; note = 2'-O-Methyl-uridine
  modified_base 95: mod_base = OTHER; note = 2'-O-Methyl-guanosine
  modified_base 96: mod_base = OTHER; note = 2'-O-Methyl-cytidine
  modified_base 97: mod_base = OTHER; note = 2'-O-Methyl-uridine phosphorothioate
  modified_base 98: mod_base = OTHER; note = 2'-O-Methyl-uridine phosphorothioate
  modified_base 99: mod_base = OTHER; note = 2'-O-Methyl-uridine phosphorothioate
  modified_base 100: mod_base = OTHER; note = 2'-O-Methyl-uridine
  misc_difference 101: note = 2'-O-Methyl-adenosine, 2'-O-Methyl-cytidine, 2'-O-Methyl-guanosine, 2'-O-Methyl-inosine, 2'-O-Methyl-uridine, deoxyadenosine, deoxyguanosine, deoxycytidine, thymine, 2'-O-methylnebularine, or 2'-deoxynebularine
  misc_difference 102: note = 2'-O-Methyl-adenosine, 2'-O-Methyl-cytidine, 2'-O-Methyl-guanosine, 2'-O-Methyl-inosine, 2'-O-Methyl-uridine, deoxyadenosine, deoxyguanosine, deoxycytidine, thymine, 2'-O-methylnebularine, or 2'-deoxynebularine
  misc_difference 103: note = 2'-O-Methyl-adenosine, 2'-O-Methyl-cytidine, 2'-O-Methyl-guanosine, 2'-O-Methyl-inosine, 2'-O-Methyl-uridine, deoxyadenosine, deoxyguanosine, deoxycytidine, thymine, 2'-O-methylnebularine, or 2'-deoxynebularine

SEQ ID NO: 3140 - RNA, 103 nt, synthetic construct; identical to SEQ ID NO: 1797
  source 1..103: mol_type = other RNA
  modified_base 1: mod_base = OTHER; note = 2'-O-Methyl-cytidine phosphorothioate
  modified_base 2: mod_base = OTHER; note = 2'-O-Methyl-adenosine phosphorothioate
  modified_base 3: mod_base = OTHER; note = 2'-O-Methyl-guanosine phosphorothioate
  modified_base 21: mod_base = OTHER; note = 2'-O-Methyl-guanosine
  modified_base 28: mod_base = OTHER; note = 2'-O-Methyl-adenosine
  modified_base 29: mod_base = OTHER; note = 2'-O-Methyl-guanosine
  modified_base 30: mod_base = OTHER; note = 2'-O-Methyl-cytidine
  modified_base 31: mod_base = OTHER; note = 2'-O-Methyl-uridine
  modified_base 32: mod_base = OTHER; note = 2'-O-Methyl-adenosine
  modified_base 34: mod_base = OTHER; note = 2'-O-Methyl-adenosine
  modified_base 35: mod_base = OTHER; note = 2'-O-Methyl-adenosine
  modified_base 36: mod_base = OTHER; note = 2'-O-Methyl-adenosine
  modified_base 37: mod_base = OTHER; note = 2'-O-Methyl-uridine
  modified_base 38: mod_base = OTHER; note = 2'-O-Methyl-adenosine
  modified_base 39: mod_base = OTHER; note = 2'-O-Methyl-guanosine
  modified_base 40: mod_base = OTHER; note = 2'-O-Methyl-cytidine
  modified_base 41: mod_base = OTHER; note = 2'-O-Methyl-adenosine
  modified_base 42: mod_base = OTHER; note = 2'-O-Methyl-adenosine
  modified_base 46: mod_base = OTHER; note = 2'-O-Methyl-adenosine
  modified_base 48: mod_base = OTHER; note = 2'-O-Methyl-adenosine
  modified_base 50: mod_base = OTHER; note = 2'-O-Methyl-uridine
  modified_base 52: mod_base = OTHER; note = 2'-O-Methyl-adenosine
  modified_base 53: mod_base = OTHER; note = 2'-O-Methyl-guanosine
  modified_base 54: mod_base = OTHER; note = 2'-O-Methyl-guanosine
  modified_base 57: mod_base = OTHER; note = 2'-O-Methyl-adenosine
  modified_base 61: mod_base = OTHER; note = 2'-O-Methyl-cytidine
  modified_base 66: mod_base = OTHER; note = 2'-O-Methyl-uridine
  modified_base 67: mod_base = OTHER; note = 2'-O-Methyl-cytidine
  modified_base 70: mod_base = OTHER; note = 2'-O-Methyl-cytidine
  modified_base 71: mod_base = OTHER; note = 2'-O-Methyl-uridine
  modified_base 72: mod_base = OTHER; note = 2'-O-Methyl-uridine
  modified_base 74: mod_base = OTHER; note = 2'-O-Methyl-adenosine
  modified_base 75: mod_base = OTHER; note = 2'-O-Methyl-adenosine
  modified_base 76: mod_base = OTHER; note = 2'-O-Methyl-adenosine
  modified_base 77: mod_base = OTHER; note = 2'-O-Methyl-adenosine
  modified_base 78: mod_base = OTHER; note = 2'-O-Methyl-adenosine
  modified_base 79: mod_base = OTHER; note = 2'-O-Methyl-guanosine
  modified_base 80: mod_base = OTHER; note = 2'-O-Methyl-uridine
  modified_base 82: mod_base = OTHER; note = 2'-O-Methyl-guanosine
  modified_base 83: mod_base = OTHER; note = 2'-O-Methyl-cytidine
  modified_base 84: mod_base = OTHER; note = 2'-O-Methyl-adenosine
  modified_base 85: mod_base = OTHER; note = 2'-O-Methyl-cytidine
  modified_base 86: mod_base = OTHER; note = 2'-O-Methyl-cytidine
  modified_base 87: mod_base = OTHER; note = 2'-O-Methyl-guanosine
  modified_base 89: mod_base = OTHER; note = 2'-O-Methyl-guanosine
  modified_base 92: mod_base = OTHER; note = 2'-O-Methyl-guanosine
  modified_base 93: mod_base = OTHER; note = 2'-O-Methyl-guanosine
  modified_base 94: mod_base = OTHER; note = 2'-O-Methyl-uridine
  modified_base 95: mod_base = OTHER; note = 2'-O-Methyl-guanosine
  modified_base 96: mod_base = OTHER; note = 2'-O-Methyl-cytidine
  modified_base 97: mod_base = OTHER; note = 2'-O-Methyl-uridine phosphorothioate
  modified_base 98: mod_base = OTHER; note = 2'-O-Methyl-uridine phosphorothioate
  modified_base 99: mod_base = OTHER; note = 2'-O-Methyl-uridine phosphorothioate
  modified_base 100: mod_base = OTHER; note = 2'-O-Methyl-uridine
  misc_difference 101: note = 2'-O-Methyl-adenosine, 2'-O-Methyl-cytidine, 2'-O-Methyl-guanosine, 2'-O-Methyl-inosine, 2'-O-Methyl-uridine, deoxyadenosine, deoxyguanosine, deoxycytidine, thymine, 2'-O-methylnebularine, or 2'-deoxynebularine
  misc_difference 102: note = 2'-O-Methyl-adenosine, 2'-O-Methyl-cytidine, 2'-O-Methyl-guanosine, 2'-O-Methyl-inosine, 2'-O-Methyl-uridine, deoxyadenosine, deoxyguanosine, deoxycytidine, thymine, 2'-O-methylnebularine, or 2'-deoxynebularine
  misc_difference 103: note = 2'-O-Methyl-adenosine, 2'-O-Methyl-cytidine, 2'-O-Methyl-guanosine, 2'-O-Methyl-inosine, 2'-O-Methyl-uridine, deoxyadenosine, deoxyguanosine, deoxycytidine, thymine, 2'-O-methylnebularine, or 2'-deoxynebularine

SEQ ID NO: 3141 - RNA, 103 nt, synthetic construct; identical to SEQ ID NO: 1797
  source 1..103: mol_type = other RNA
  modified_base 1: mod_base = OTHER; note = 2'-O-Methyl-cytidine phosphorothioate
  modified_base 2: mod_base = OTHER; note = 2'-O-Methyl-adenosine phosphorothioate
  modified_base 3: mod_base = OTHER; note = 2'-O-Methyl-guanosine phosphorothioate
  modified_base 21: mod_base = OTHER; note = 2'-O-Methyl-guanosine
  modified_base 28: mod_base = OTHER; note = 2'-O-Methyl-adenosine
  modified_base 29: mod_base = OTHER; note = 2'-O-Methyl-guanosine
  modified_base 30: mod_base = OTHER; note = 2'-O-Methyl-cytidine
  modified_base 31: mod_base = OTHER; note = 2'-O-Methyl-uridine
  modified_base 32: mod_base = OTHER; note = 2'-O-Methyl-adenosine
  modified_base 33: mod_base = OTHER; note = 2'-O-Methyl-guanosine
  modified_base 34: mod_base = OTHER; note = 2'-O-Methyl-adenosine
  modified_base 35: mod_base = OTHER; note = 2'-O-Methyl-adenosine
  modified_base 36: mod_base = OTHER; note = 2'-O-Methyl-adenosine
  modified_base 37: mod_base = OTHER; note = 2'-O-Methyl-uridine
  modified_base 38: mod_base = OTHER; note = 2'-O-Methyl-adenosine
  modified_base 39: mod_base = OTHER; note = 2'-O-Methyl-guanosine
  modified_base 40: mod_base = OTHER; note = 2'-O-Methyl-cytidine
  modified_base 41: mod_base = OTHER; note = 2'-O-Methyl-adenosine
  modified_base 42: mod_base = OTHER; note = 2'-O-Methyl-adenosine
  modified_base 46: mod_base = OTHER; note = 2'-O-Methyl-adenosine
  modified_base 48: mod_base = OTHER; note = 2'-O-Methyl-adenosine
  modified_base 50: mod_base = OTHER; note = 2'-O-Methyl-uridine
  modified_base 52: mod_base = OTHER; note = 2'-O-Methyl-adenosine
  modified_base 53: mod_base = OTHER; note = 2'-O-Methyl-guanosine
  modified_base 54: mod_base = OTHER; note = 2'-O-Methyl-guanosine
  modified_base 55: mod_base = OTHER; note = 2'-O-Methyl-cytidine
  modified_base 56: mod_base = OTHER; note = 2'-O-Methyl-uridine
  modified_base 57: mod_base = OTHER; note = 2'-O-Methyl-adenosine
  modified_base 60: mod_base = OTHER; note = 2'-O-Methyl-cytidine
  modified_base 61: mod_base = OTHER; note = 2'-O-Methyl-cytidine
  modified_base 66: mod_base = OTHER; note = 2'-O-Methyl-uridine
  modified_base 67: mod_base = OTHER; note = 2'-O-Methyl-cytidine
  modified_base 70: mod_base = OTHER; note = 2'-O-Methyl-cytidine
  modified_base 71: mod_base = OTHER; note = 2'-O-Methyl-uridine
  modified_base 72: mod_base = OTHER; note = 2'-O-Methyl-uridine
  modified_base 73: mod_base = OTHER; note = 2'-O-Methyl-guanosine
  modified_base 74: mod_base = OTHER; note = 2'-O-Methyl-adenosine
  modified_base 75: mod_base = OTHER; note = 2'-O-Methyl-adenosine
  modified_base 76: mod_base = OTHER; note = 2'-O-Methyl-adenosine
  modified_base 77: mod_base = OTHER; note = 2'-O-Methyl-adenosine
  modified_base 78: mod_base = OTHER; note = 2'-O-Methyl-adenosine
  modified_base 79: mod_base = OTHER; note = 2'-O-Methyl-guanosine
  modified_base 80: mod_base = OTHER; note = 2'-O-Methyl-uridine
  modified_base 81: mod_base = OTHER; note = 2'-O-Methyl-guanosine
  modified_base 83: mod_base = OTHER; note = 2'-O-Methyl-cytidine
  modified_base 84: mod_base = OTHER; note = 2'-O-Methyl-adenosine
  modified_base 85: mod_base = OTHER; note = 2'-O-Methyl-cytidine
  modified_base 86: mod_base = OTHER; note = 2'-O-Methyl-cytidine
  modified_base 87: mod_base = OTHER; note = 2'-O-Methyl-guanosine
  modified_base 88: mod_base = OTHER; note = 2'-O-Methyl-adenosine
  modified_base 89: mod_base = OTHER; note = 2'-O-Methyl-guanosine
  modified_base 90: mod_base = OTHER; note = 2'-O-Methyl-uridine
  modified_base 91: mod_base = OTHER; note = 2'-O-Methyl-cytidine
  modified_base 92: mod_base = OTHER; note = 2'-O-Methyl-guanosine
  modified_base 93: mod_base = OTHER; note = 2'-O-Methyl-guanosine
  modified_base 94: mod_base = OTHER; note = 2'-O-Methyl-uridine
  modified_base 95: mod_base = OTHER; note = 2'-O-Methyl-guanosine
  modified_base 96: mod_base = OTHER; note = 2'-O-Methyl-cytidine
  modified_base 97: mod_base = OTHER; note = 2'-O-Methyl-uridine phosphorothioate
  modified_base 98: mod_base = OTHER; note = 2'-O-Methyl-uridine phosphorothioate
  modified_base 99: mod_base = OTHER; note = 2'-O-Methyl-uridine phosphorothioate
  modified_base 100: mod_base = OTHER; note = 2'-O-Methyl-uridine
  misc_difference 101: note = 2'-O-Methyl-adenosine, 2'-O-Methyl-cytidine, 2'-O-Methyl-guanosine, 2'-O-Methyl-inosine, 2'-O-Methyl-uridine, deoxyadenosine, deoxyguanosine, deoxycytidine, thymine, 2'-O-methylnebularine, or 2'-deoxynebularine
  misc_difference 102: note = 2'-O-Methyl-adenosine, 2'-O-Methyl-cytidine, 2'-O-Methyl-guanosine, 2'-O-Methyl-inosine, 2'-O-Methyl-uridine, deoxyadenosine, deoxyguanosine, deoxycytidine, thymine, 2'-O-methylnebularine, or 2'-deoxynebularine
  misc_difference 103: note = 2'-O-Methyl-adenosine, 2'-O-Methyl-cytidine, 2'-O-Methyl-guanosine, 2'-O-Methyl-inosine, 2'-O-Methyl-uridine, deoxyadenosine, deoxyguanosine, deoxycytidine, thymine, 2'-O-methylnebularine, or 2'-deoxynebularine

SEQ ID NO: 3142 - DNA, 100 bp, synthetic construct; identical to SEQ ID NO: 2115
  source 1..100: mol_type = other DNA
  modified_base 1: mod_base = OTHER; note = 2'-O-Methyl-cytidine phosphorothioate
  modified_base 2: mod_base = OTHER; note = 2'-O-Methyl-adenosine phosphorothioate
  modified_base 3: mod_base = OTHER; note = 2'-O-Methyl-guanosine phosphorothioate
  modified_base 21: mod_base = OTHER; note = 2'-O-Methyl-guanosine
  modified_base 28: mod_base = OTHER; note = 2'-O-Methyl-adenosine
  modified_base 29: mod_base = OTHER; note = 2'-O-Methyl-guanosine
  modified_base 30: mod_base = OTHER; note = 2'-O-Methyl-cytidine
  modified_base 31: mod_base = OTHER; note = 2'-O-Methyl-uridine
  modified_base 32: mod_base = OTHER; note = 2'-O-Methyl-adenosine
  modified_base 33: mod_base = OTHER; note = 2'-O-Methyl-guanosine
  modified_base 34: mod_base = OTHER; note = 2'-O-Methyl-adenosine
  modified_base 35: mod_base = OTHER; note = 2'-O-Methyl-adenosine
  modified_base 36: mod_base = OTHER; note = 2'-O-Methyl-adenosine
  modified_base 37: mod_base = OTHER; note = 2'-O-Methyl-uridine
  modified_base 38: mod_base = OTHER; note = 2'-O-Methyl-adenosine
  modified_base 39: mod_base = OTHER; note = 2'-O-Methyl-guanosine
  modified_base 40: mod_base = OTHER; note = 2'-O-Methyl-cytidine
  modified_base 41: mod_base = OTHER; note = 2'-O-Methyl-adenosine
  modified_base 42: mod_base = OTHER; note = 2'-O-Methyl-adenosine
  modified_base 46: mod_base = OTHER; note = 2'-O-Methyl-adenosine
  modified_base 48: mod_base = OTHER; note = 2'-O-Methyl-adenosine
  modified_base 50: mod_base = OTHER; note = 2'-O-Methyl-uridine
  modified_base 52: mod_base = OTHER; note = 2'-O-Methyl-adenosine
  modified_base 53: mod_base = OTHER; note = 2'-O-Methyl-guanosine
  modified_base 54: mod_base = OTHER; note = 2'-O-Methyl-guanosine
  modified_base 55: mod_base = OTHER; note = 2'-O-Methyl-cytidine
  modified_base 56: mod_base = OTHER; note = 2'-O-Methyl-uridine
  modified_base 57: mod_base = OTHER; note = 2'-O-Methyl-adenosine
  modified_base 60: mod_base = OTHER; note = 2'-O-Methyl-cytidine
  modified_base 61: mod_base = OTHER; note = 2'-O-Methyl-cytidine
  modified_base 66: mod_base = OTHER; note = 2'-O-Methyl-uridine
  modified_base 67: mod_base = OTHER; note = 2'-O-Methyl-cytidine
  modified_base 70: mod_base = OTHER; note = 2'-O-Methyl-cytidine
  modified_base 71: mod_base = OTHER; note = 2'-O-Methyl-uridine
  modified_base 72: mod_base = OTHER; note = 2'-O-Methyl-uridine
  modified_base 73: mod_base = OTHER; note = 2'-O-Methyl-guanosine
  modified_base 74: mod_base = OTHER; note = 2'-O-Methyl-adenosine
  modified_base 75: mod_base = OTHER; note = 2'-O-Methyl-adenosine
  modified_base 76: mod_base = OTHER; note = 2'-O-Methyl-adenosine
  modified_base 77: mod_base = OTHER; note = 2'-O-Methyl-adenosine
  modified_base 78: mod_base = OTHER; note = 2'-O-Methyl-adenosine
  modified_base 79: mod_base = OTHER; note = 2'-O-Methyl-guanosine
  modified_base 80: mod_base = OTHER; note = 2'-O-Methyl-uridine
  modified_base 81: mod_base = OTHER; note = 2'-O-Methyl-guanosine
  modified_base 83: mod_base = OTHER; note = 2'-O-Methyl-cytidine
  modified_base 84: mod_base = OTHER; note = 2'-O-Methyl-adenosine
  modified_base 85: mod_base = OTHER; note = 2'-O-Methyl-cytidine
  modified_base 86: mod_base = OTHER; note = 2'-O-Methyl-cytidine
  modified_base 87: mod_base = OTHER; note = 2'-O-Methyl-guanosine
  modified_base 88: mod_base = OTHER; note = 2'-O-Methyl-adenosine
  modified_base 89: mod_base = OTHER; note = 2'-O-Methyl-guanosine
  modified_base 90: mod_base = OTHER; note = 2'-O-Methyl-uridine
  modified_base 91: mod_base = OTHER; note = 2'-O-Methyl-cytidine
  modified_base 92: mod_base = OTHER; note = 2'-O-Methyl-guanosine
  modified_base 93: mod_base = OTHER; note = 2'-O-Methyl-guanosine
  modified_base 94: mod_base = OTHER; note = 2'-O-Methyl-uridine
  modified_base 95: mod_base = OTHER; note = 2'-O-Methyl-guanosine
  modified_base 96: mod_base = OTHER; note = 2'-O-Methyl-cytidine
  modified_base 97: mod_base = OTHER; note = 2'-O-Methyl-uridine phosphorothioate
  modified_base 98: mod_base = OTHER; note = 2'-deoxynebularine phosphorothioate
  modified_base 99: mod_base = OTHER; note = 2'-deoxynebularine phosphorothioate
  modified_base 100: mod_base = OTHER; note = 2'-deoxynebularine
  misc_feature 1..97: note = RNA
  misc_feature 98..100: note = DNA

SEQ ID NO: 3143 - DNA, 100 bp, synthetic construct; identical to SEQ ID NO: 2117
  source 1..100: mol_type = other DNA
  modified_base 1: mod_base = OTHER; note = 2'-O-Methyl-cytidine phosphorothioate
  modified_base 2: mod_base = OTHER; note = 2'-O-Methyl-adenosine phosphorothioate
  modified_base 3: mod_base = OTHER; note = 2'-O-Methyl-guanosine phosphorothioate
  modified_base 21: mod_base = OTHER; note = 2'-O-Methyl-guanosine
  modified_base 28: mod_base = OTHER; note = 2'-O-Methyl-adenosine
  modified_base 29: mod_base = OTHER; note = 2'-O-Methyl-guanosine
  modified_base 30: mod_base = OTHER; note = 2'-O-Methyl-cytidine
  modified_base 31: mod_base = OTHER; note = 2'-O-Methyl-uridine
  modified_base 32: mod_base = OTHER; note = 2'-O-Methyl-adenosine
  modified_base 33: mod_base = OTHER; note = 2'-O-Methyl-guanosine
  modified_base 34: mod_base = OTHER; note = 2'-O-Methyl-adenosine
  modified_base 35: mod_base = OTHER; note = 2'-O-Methyl-adenosine
  modified_base 36: mod_base = OTHER; note = 2'-O-Methyl-adenosine
  modified_base 37: mod_base = OTHER; note = 2'-O-Methyl-uridine
  modified_base 38: mod_base = OTHER; note = 2'-O-Methyl-adenosine
  modified_base 39: mod_base = OTHER; note = 2'-O-Methyl-guanosine
  modified_base 40: mod_base = OTHER; note = 2'-O-Methyl-cytidine
  modified_base 41: mod_base = OTHER; note = 2'-O-Methyl-adenosine
  modified_base 42: mod_base = OTHER; note = 2'-O-Methyl-adenosine
  modified_base 46: mod_base = OTHER; note = 2'-O-Methyl-adenosine
  modified_base 48: mod_base = OTHER; note = 2'-O-Methyl-adenosine
  modified_base 50: mod_base = OTHER; note = 2'-O-Methyl-uridine
  modified_base 52: mod_base = OTHER; note = 2'-O-Methyl-adenosine
  modified_base 53: mod_base = OTHER; note = 2'-O-Methyl-guanosine
  modified_base 54: mod_base = OTHER; note = 2'-O-Methyl-guanosine
  modified_base 55: mod_base = OTHER; note = 2'-O-Methyl-cytidine
  modified_base 56: mod_base = OTHER; note = 2'-O-Methyl-uridine
  modified_base 57: mod_base = OTHER; note = 2'-O-Methyl-adenosine
  modified_base 60: mod_base = OTHER; note = 2'-O-Methyl-cytidine
  modified_base 61: mod_base = OTHER; note = 2'-O-Methyl-cytidine
  modified_base 66: mod_base = OTHER; note = 2'-O-Methyl-uridine
  modified_base 67: mod_base = OTHER; note = 2'-O-Methyl-cytidine
  modified_base 70: mod_base = OTHER; note = 2'-O-Methyl-cytidine
  modified_base 71: mod_base = OTHER; note = 2'-O-Methyl-uridine
  modified_base 72: mod_base = OTHER; note = 2'-O-Methyl-uridine
  modified_base 73: mod_base = OTHER; note = 2'-O-Methyl-guanosine
  modified_base 74: mod_base = OTHER; note = 2'-O-Methyl-adenosine
  modified_base 75: mod_base = OTHER; note = 2'-O-Methyl-adenosine
  modified_base 76: mod_base = OTHER; note = 2'-O-Methyl-adenosine
  modified_base 77: mod_base = OTHER; note = 2'-O-Methyl-adenosine
  modified_base 78: mod_base = OTHER; note = 2'-O-Methyl-adenosine
  modified_base 79: mod_base = OTHER; note = 2'-O-Methyl-guanosine
  modified_base 80: mod_base = OTHER; note = 2'-O-Methyl-uridine
  modified_base 81: mod_base = OTHER; note = 2'-O-Methyl-guanosine
  modified_base 83: mod_base = OTHER; note = 2'-O-Methyl-cytidine
  modified_base 84: mod_base = OTHER; note = 2'-O-Methyl-adenosine
  modified_base 85: mod_base = OTHER; note = 2'-O-Methyl-cytidine
  modified_base 86: mod_base = OTHER; note = 2'-O-Methyl-cytidine
  modified_base 87: mod_base = OTHER; note = 2'-O-Methyl-guanosine
  modified_base 88: mod_base = OTHER; note = 2'-O-Methyl-adenosine
  modified_base 89: mod_base = OTHER; note = 2'-O-Methyl-guanosine
  modified_base 90: mod_base = OTHER; note = 2'-O-Methyl-uridine
  modified_base 91: mod_base = OTHER; note = 2'-O-Methyl-cytidine
  modified_base 92: mod_base = OTHER; note = 2'-O-Methyl-guanosine
  modified_base 93: mod_base = OTHER; note = 2'-O-Methyl-guanosine
  modified_base 94: mod_base = OTHER; note = 2'-O-Methyl-uridine
  modified_base 95: mod_base = OTHER; note = 2'-O-Methyl-guanosine
  modified_base 96: mod_base = OTHER; note = 2'-O-Methyl-cytidine
  modified_base 97: mod_base = OTHER; note = 2'-O-Methyl-uridine phosphorothioate
  modified_base 98: mod_base = OTHER; note = 2'-O-Methyl-uridine phosphorothioate
  modified_base 99: mod_base = OTHER; note = 2'-deoxynebularine phosphorothioate
  modified_base 100: mod_base = OTHER; note = 2'-deoxynebularine
  misc_feature 1..98: note = RNA
  misc_feature 99..100: note = DNA

SEQ ID NO: 3144 - DNA, 100 bp, synthetic construct; identical to SEQ ID NO: 2119
  source 1..100: mol_type = other DNA
  modified_base 1: mod_base = OTHER; note = 2'-O-Methyl-cytidine phosphorothioate
  modified_base 2: mod_base = OTHER; note = 2'-O-Methyl-adenosine phosphorothioate
  modified_base 3: mod_base = OTHER; note = 2'-O-Methyl-guanosine phosphorothioate
  modified_base 21: mod_base = OTHER; note = 2'-O-Methyl-guanosine
  modified_base 28: mod_base = OTHER; note = 2'-O-Methyl-adenosine
  modified_base 29: mod_base = OTHER; note = 2'-O-Methyl-guanosine
  modified_base 30: mod_base = OTHER; note = 2'-O-Methyl-cytidine
  modified_base 31: mod_base = OTHER; note = 2'-O-Methyl-uridine
  modified_base 32: mod_base = OTHER; note = 2'-O-Methyl-adenosine
  modified_base 33: mod_base = OTHER; note = 2'-O-Methyl-guanosine
  modified_base 34: mod_base = OTHER; note = 2'-O-Methyl-adenosine
  modified_base 35: mod_base = OTHER; note = 2'-O-Methyl-adenosine
  modified_base 36: mod_base = OTHER; note = 2'-O-Methyl-adenosine
  modified_base 37: mod_base = OTHER; note = 2'-O-Methyl-uridine
  modified_base 38: mod_base = OTHER; note = 2'-O-Methyl-adenosine
  modified_base 39: mod_base = OTHER; note = 2'-O-Methyl-guanosine
  modified_base 40: mod_base = OTHER; note = 2'-O-Methyl-cytidine
  modified_base 41: mod_base = OTHER; note = 2'-O-Methyl-adenosine
  modified_base 42: mod_base = OTHER; note = 2'-O-Methyl-adenosine
  modified_base 46: mod_base = OTHER; note = 2'-O-Methyl-adenosine
  modified_base 48: mod_base = OTHER; note = 2'-O-Methyl-adenosine
  modified_base 50: mod_base = OTHER; note = 2'-O-Methyl-uridine
  modified_base 52: mod_base = OTHER; note = 2'-O-Methyl-adenosine
  modified_base 53: mod_base = OTHER; note = 2'-O-Methyl-guanosine
  modified_base 54: mod_base = OTHER; note = 2'-O-Methyl-guanosine
  modified_base 55: mod_base = OTHER; note = 2'-O-Methyl-cytidine
  modified_base 56: mod_base = OTHER; note = 2'-O-Methyl-uridine
  modified_base 57: mod_base = OTHER; note = 2'-O-Methyl-adenosine
  modified_base 60: mod_base = OTHER; note = 2'-O-Methyl-cytidine
  modified_base 61: mod_base = OTHER; note = 2'-O-Methyl-cytidine
  modified_base 66: mod_base = OTHER; note = 2'-O-Methyl-uridine
  modified_base 67: mod_base = OTHER; note = 2'-O-Methyl-cytidine
  modified_base 70: mod_base = OTHER; note = 2'-O-Methyl-cytidine
  modified_base 71: mod_base = OTHER; note = 2'-O-Methyl-uridine
  modified_base 72: mod_base = OTHER; note = 2'-O-Methyl-uridine
  modified_base 73: mod_base = OTHER; note = 2'-O-Methyl-guanosine
  modified_base 74: mod_base = OTHER; note = 2'-O-Methyl-adenosine
  modified_base 75: mod_base = OTHER; note = 2'-O-Methyl-adenosine
  modified_base 76: mod_base = OTHER; note = 2'-O-Methyl-adenosine
  modified_base 77: mod_base = OTHER; note = 2'-O-Methyl-adenosine
  modified_base 78: mod_base = OTHER; note = 2'-O-Methyl-adenosine
  modified_base 79: mod_base = OTHER; note = 2'-O-Methyl-guanosine
  modified_base 80: mod_base = OTHER; note = 2'-O-Methyl-uridine
  modified_base 81: mod_base = OTHER; note = 2'-O-Methyl-guanosine
  modified_base 83: mod_base = OTHER; note = 2'-O-Methyl-cytidine
  modified_base 84: mod_base = OTHER; note = 2'-O-Methyl-adenosine
  modified_base 85: mod_base = OTHER; note = 2'-O-Methyl-cytidine
  modified_base 86: mod_base = OTHER; note = 2'-O-Methyl-cytidine
  modified_base 87: mod_base = OTHER; note = 2'-O-Methyl-guanosine
  modified_base 88: mod_base = OTHER; note = 2'-O-Methyl-adenosine
  modified_base 89: mod_base = OTHER; note = 2'-O-Methyl-guanosine
  modified_base 90: mod_base = OTHER; note = 2'-O-Methyl-uridine
  modified_base 91: mod_base = OTHER; note = 2'-O-Methyl-cytidine
  modified_base 92: mod_base = OTHER; note = 2'-O-Methyl-guanosine
  modified_base 93: mod_base = OTHER; note = 2'-O-Methyl-guanosine
  modified_base 94: mod_base = OTHER; note = 2'-O-Methyl-uridine
  modified_base 95: mod_base = OTHER; note = 2'-O-Methyl-guanosine
  modified_base 96: mod_base = OTHER; note = 2'-O-Methyl-cytidine
  modified_base 97: mod_base = OTHER; note = 2'-O-Methyl-uridine phosphorothioate
  modified_base 98: mod_base = OTHER; note = 2'-O-Methyl-uridine phosphorothioate
  modified_base 99: mod_base = OTHER; note = 2'-O-Methyl-uridine phosphorothioate
  modified_base 100: mod_base = OTHER; note = 2'-deoxynebularine
  misc_feature 1..99: note = RNA
  misc_feature 100: note = DNA

SEQ ID NO: 3145 - DNA, 103 bp, synthetic construct; identical to SEQ ID NO: 2121
  source 1..103: mol_type = other DNA
  modified_base 1: mod_base = OTHER; note = 2'-O-Methyl-cytidine phosphorothioate
  modified_base 2: mod_base = OTHER; note = 2'-O-Methyl-adenosine phosphorothioate
  modified_base 3: mod_base = OTHER; note = 2'-O-Methyl-guanosine phosphorothioate
  modified_base 21: mod_base = OTHER; note = 2'-O-Methyl-guanosine
  modified_base 28: mod_base = OTHER; note = 2'-O-Methyl-adenosine
  modified_base 29: mod_base = OTHER; note = 2'-O-Methyl-guanosine
  modified_base 30: mod_base = OTHER; note = 2'-O-Methyl-cytidine
  modified_base 31: mod_base = OTHER; note = 2'-O-Methyl-uridine
  modified_base 32: mod_base = OTHER; note = 2'-O-Methyl-adenosine
  modified_base 34: mod_base = OTHER; note = 2'-O-Methyl-adenosine
  modified_base 35: mod_base = OTHER; note = 2'-O-Methyl-adenosine
  modified_base 36: mod_base = OTHER; note = 2'-O-Methyl-adenosine
  modified_base 37: mod_base = OTHER; note = 2'-O-Methyl-uridine
  modified_base 38: mod_base = OTHER; note = 2'-O-Methyl-adenosine
  modified_base 39: mod_base = OTHER; note = 2'-O-Methyl-guanosine
  modified_base 40: mod_base = OTHER; note = 2'-O-Methyl-cytidine
  modified_base 41: mod_base = OTHER; note = 2'-O-Methyl-adenosine
  modified_base 42: mod_base = OTHER; note = 2'-O-Methyl-adenosine
  modified_base 46: mod_base = OTHER; note = 2'-O-Methyl-adenosine
  modified_base 48: mod_base = OTHER; note = 2'-O-Methyl-adenosine
  modified_base 50: mod_base = OTHER; note = 2'-O-Methyl-uridine
  modified_base 52: mod_base = OTHER; note = 2'-O-Methyl-adenosine
  modified_base 53: mod_base = OTHER; note = 2'-O-Methyl-guanosine
  modified_base 54: mod_base = OTHER; note = 2'-O-Methyl-guanosine
  modified_base 57: mod_base = OTHER; note = 2'-O-Methyl-adenosine
  modified_base 61: mod_base = OTHER; note = 2'-O-Methyl-cytidine
  modified_base 66: mod_base = OTHER; note = 2'-O-Methyl-uridine
  modified_base 67: mod_base = OTHER; note = 2'-O-Methyl-cytidine
  modified_base 70: mod_base = OTHER; note = 2'-O-Methyl-cytidine
  modified_base 71: mod_base = OTHER; note = 2'-O-Methyl-uridine
  modified_base 72: mod_base = OTHER; note = 2'-O-Methyl-uridine
  modified_base 74: mod_base = OTHER; note = 2'-O-Methyl-adenosine
  modified_base 75: mod_base = OTHER; note = 2'-O-Methyl-adenosine
  modified_base 76: mod_base = OTHER; note = 2'-O-Methyl-adenosine
  modified_base 77: mod_base = OTHER; note = 2'-O-Methyl-adenosine
  modified_base 78: mod_base = OTHER; note = 2'-O-Methyl-adenosine
  modified_base 79: mod_base = OTHER; note = 2'-O-Methyl-guanosine
  modified_base 80: mod_base = OTHER; note = 2'-O-Methyl-uridine
  modified_base 82: mod_base = OTHER; note = 2'-O-Methyl-guanosine
  modified_base 83: mod_base = OTHER; note = 2'-O-Methyl-cytidine
  modified_base 84: mod_base = OTHER; note = 2'-O-Methyl-adenosine
  modified_base 85: mod_base = OTHER; note = 2'-O-Methyl-cytidine
  modified_base 86: mod_base = OTHER; note = 2'-O-Methyl-cytidine
  modified_base 87: mod_base = OTHER; note = 2'-O-Methyl-guanosine
  modified_base 89: mod_base = OTHER; note = 2'-O-Methyl-guanosine
  modified_base 92: mod_base = OTHER; note = 2'-O-Methyl-guanosine
  modified_base 93: mod_base = OTHER; note = 2'-O-Methyl-guanosine
  modified_base 94: mod_base = OTHER; note = 2'-O-Methyl-uridine
  modified_base 95: mod_base = OTHER; note = 2'-O-Methyl-guanosine
  modified_base 96: mod_base = OTHER; note = 2'-O-Methyl-cytidine
  modified_base 97: mod_base = OTHER; note = 2'-O-Methyl-uridine phosphorothioate
  modified_base 98: mod_base = OTHER; note = 2'-O-Methyl-uridine phosphorothioate
  modified_base 99: mod_base = OTHER; note = 2'-O-Methyl-uridine phosphorothioate
  modified_base 100: mod_base = OTHER; note = 2'-O-Methyl-uridine
  modified_base 101: mod_base = OTHER; note = 2'-deoxynebularine
  modified_base 102: mod_base = OTHER; note = 2'-deoxynebularine
  modified_base 103: mod_base = OTHER; note = 2'-deoxynebularine
  misc_feature 1..100: note = RNA
  misc_feature 101..103: note = DNA

SEQ ID NO: 3146 - DNA, 103 bp, synthetic construct; identical to SEQ ID NO: 2121
  source 1..103: mol_type = other DNA
  modified_base 1: mod_base = OTHER; note = 2'-O-Methyl-cytidine phosphorothioate
  modified_base 2: mod_base = OTHER; note = 2'-O-Methyl-adenosine phosphorothioate
  modified_base 3: mod_base = OTHER; note = 2'-O-Methyl-guanosine phosphorothioate
  modified_base 21: mod_base = OTHER; note = 2'-O-Methyl-guanosine
  modified_base 28: mod_base = OTHER; note = 2'-O-Methyl-adenosine
  modified_base 29: mod_base = OTHER; note = 2'-O-Methyl-guanosine
  modified_base 30: mod_base = OTHER; note = 2'-O-Methyl-cytidine
  modified_base 31: mod_base = OTHER; note = 2'-O-Methyl-uridine
  modified_base 32: mod_base = OTHER; note = 2'-O-Methyl-adenosine
  modified_base 33: mod_base = OTHER; note = 2'-O-Methyl-guanosine
  modified_base 34: mod_base = OTHER; note = 2'-O-Methyl-adenosine
  modified_base 35: mod_base = OTHER; note = 2'-O-Methyl-adenosine
  modified_base 36: mod_base = OTHER; note = 2'-O-Methyl-adenosine
  modified_base 37: mod_base = OTHER; note = 2'-O-Methyl-uridine
  modified_base 38: mod_base = OTHER; note = 2'-O-Methyl-adenosine
  modified_base 39: mod_base = OTHER; note = 2'-O-Methyl-guanosine
  modified_base 40: mod_base = OTHER; note = 2'-O-Methyl-cytidine
  modified_base 41: mod_base = OTHER; note = 2'-O-Methyl-adenosine
  modified_base 42: mod_base = OTHER; note = 2'-O-Methyl-adenosine
  modified_base 46: mod_base = OTHER; note = 2'-O-Methyl-adenosine
  modified_base 48: mod_base = OTHER; note = 2'-O-Methyl-adenosine
  modified_base 50: mod_base = OTHER; note = 2'-O-Methyl-uridine
  modified_base 52: mod_base = OTHER; note = 2'-O-Methyl-adenosine
  modified_base 53: mod_base = OTHER; note = 2'-O-Methyl-guanosine
  modified_base 54: mod_base = OTHER; note = 2'-O-Methyl-guanosine
  modified_base 55: mod_base = OTHER; note = 2'-O-Methyl-cytidine
  modified_base 56: mod_base = OTHER; note = 2'-O-Methyl-uridine
  modified_base 57: mod_base = OTHER; note = 2'-O-Methyl-adenosine
  modified_base 60: mod_base = OTHER; note = 2'-O-Methyl-cytidine
  modified_base 61: mod_base = OTHER; note = 2'-O-Methyl-cytidine
  modified_base 66: mod_base = OTHER; note = 2'-O-Methyl-uridine
  modified_base 67: mod_base = OTHER; note = 2'-O-Methyl-cytidine
  modified_base 70: mod_base = OTHER; note = 2'-O-Methyl-cytidine
  modified_base 71: mod_base = OTHER; note = 2'-O-Methyl-uridine
  modified_base 72: mod_base = OTHER; note = 2'-O-Methyl-uridine
  modified_base 73: mod_base = OTHER; note = 2'-O-Methyl-guanosine
  modified_base 74: mod_base = OTHER; note = 2'-O-Methyl-adenosine
  modified_base 75: mod_base = OTHER; note = 2'-O-Methyl-adenosine
  modified_base 76: mod_base = OTHER; note = 2'-O-Methyl-adenosine
  modified_base 77: mod_base = OTHER; note = 2'-O-Methyl-adenosine
  modified_base 78: mod_base = OTHER; note = 2'-O-Methyl-adenosine
  modified_base 79: mod_base = OTHER; note = 2'-O-Methyl-guanosine
  modified_base 80: mod_base = OTHER; note = 2'-O-Methyl-uridine
  modified_base 81: mod_base = OTHER; note = 2'-O-Methyl-guanosine
  modified_base 83: mod_base = OTHER; note = 2'-O-Methyl-cytidine
  modified_base 84: mod_base = OTHER; note = 2'-O-Methyl-adenosine
  modified_base 85: mod_base = OTHER; note = 2'-O-Methyl-cytidine
  modified_base 86: mod_base = OTHER; note = 2'-O-Methyl-cytidine
  modified_base 87: mod_base = OTHER; note = 2'-O-Methyl-guanosine
  modified_base 88: mod_base = OTHER; note = 2'-O-Methyl-adenosine
  modified_base 89: mod_base = OTHER; note = 2'-O-Methyl-guanosine
  modified_base 90: mod_base = OTHER; note = 2'-O-Methyl-uridine
  modified_base 91: mod_base = OTHER; note = 2'-O-Methyl-cytidine
  modified_base 92: mod_base = OTHER; note = 2'-O-Methyl-guanosine
  modified_base 93: mod_base = OTHER; note = 2'-O-Methyl-guanosine
  modified_base 94: mod_base = OTHER; note = 2'-O-Methyl-uridine
  modified_base 95: mod_base = OTHER; note = 2'-O-Methyl-guanosine
  modified_base 96: mod_base = OTHER; note = 2'-O-Methyl-cytidine
  modified_base 97: mod_base = OTHER; note = 2'-O-Methyl-uridine phosphorothioate
  modified_base 98: mod_base = OTHER; note = 2'-O-Methyl-uridine phosphorothioate
  modified_base 99: mod_base = OTHER; note = 2'-O-Methyl-uridine phosphorothioate
  modified_base 100: mod_base = OTHER; note = 2'-O-Methyl-uridine
  modified_base 101: mod_base = OTHER; note = 2'-deoxynebularine
  modified_base 102: mod_base = OTHER; note = 2'-deoxynebularine
  modified_base 103: mod_base = OTHER; note = 2'-deoxynebularine
  misc_feature 1..100: note = RNA
  misc_feature 101..103: note = DNA

SEQ ID NO: 3147 - RNA, 100 nt, synthetic construct; identical to SEQ ID NO: 55
  source 1..100: mol_type = other RNA
  modified_base 1: mod_base = OTHER; note = 2'-O-Methyl-cytidine phosphorothioate
  modified_base 2: mod_base = OTHER; note = 2'-O-Methyl-adenosine phosphorothioate
  modified_base 3: mod_base = OTHER; note = 2'-O-Methyl-guanosine phosphorothioate
  modified_base 21: mod_base = OTHER; note = 2'-O-Methyl-guanosine
  modified_base 28: mod_base = OTHER; note = 2'-O-Methyl-adenosine
  modified_base 29: mod_base = OTHER; note = 2'-O-Methyl-guanosine
  modified_base 30: mod_base = OTHER; note = 2'-O-Methyl-cytidine
  modified_base 31: mod_base = OTHER; note = 2'-O-Methyl-uridine
  modified_base 32: mod_base = OTHER; note = 2'-O-Methyl-adenosine
  modified_base 34: mod_base = OTHER; note = 2'-O-Methyl-adenosine
  modified_base 35: mod_base = OTHER; note = 2'-O-Methyl-adenosine
  modified_base 36: mod_base = OTHER; note = 2'-O-Methyl-adenosine
  modified_base 37: mod_base = OTHER; note = 2'-O-Methyl-uridine
  modified_base 38: mod_base = OTHER; note = 2'-O-Methyl-adenosine
  modified_base 39: mod_base = OTHER; note = 2'-O-Methyl-guanosine
  modified_base 40: mod_base = OTHER; note = 2'-O-Methyl-cytidine
  modified_base 41: mod_base = OTHER; note = 2'-O-Methyl-adenosine
  modified_base 42: mod_base = OTHER; note = 2'-O-Methyl-adenosine
  modified_base 46: mod_base = OTHER; note = 2'-O-Methyl-adenosine
  modified_base 48: mod_base = OTHER; note = 2'-O-Methyl-adenosine
  modified_base 50: mod_base = OTHER; note = 2'-O-Methyl-uridine
  modified_base 52: mod_base = OTHER; note = 2'-O-Methyl-adenosine
  modified_base 53: mod_base = OTHER; note = 2'-O-Methyl-guanosine
  modified_base 54: mod_base = OTHER; note = 2'-O-Methyl-guanosine
  modified_base 57: mod_base = OTHER; note = 2'-O-Methyl-adenosine
  modified_base 61: mod_base = OTHER; note = 2'-O-Methyl-cytidine
  modified_base 66: mod_base = OTHER; note = 2'-O-Methyl-uridine
  modified_base 67: mod_base = OTHER; note = 2'-O-Methyl-cytidine
  modified_base 70: mod_base = OTHER; note = 2'-O-Methyl-cytidine
  modified_base 71: mod_base = OTHER; note = 2'-O-Methyl-uridine
  modified_base 72: mod_base = OTHER; note = 2'-O-Methyl-uridine
  modified_base 74: mod_base = OTHER; note = 2'-O-Methyl-adenosine
  modified_base 75: mod_base = OTHER; note = 2'-O-Methyl-adenosine
  modified_base 76: mod_base = OTHER; note = 2'-O-Methyl-adenosine
  modified_base 77: mod_base = OTHER; note = 2'-O-Methyl-adenosine
  modified_base 78: mod_base = OTHER; note = 2'-O-Methyl-adenosine
  modified_base 79: mod_base = OTHER; note = 2'-O-Methyl-guanosine
  modified_base 80: mod_base = OTHER; note = 2'-O-Methyl-uridine
  modified_base 83: mod_base = OTHER; note = 2'-O-Methyl-cytidine
  modified_base 84: mod_base = OTHER; note = 2'-O-Methyl-adenosine
  modified_base 85: mod_base = OTHER; note = 2'-O-Methyl-cytidine
  modified_base 86: mod_base = OTHER; note = 2'-O-Methyl-cytidine
  modified_base 87: mod_base = OTHER; note = 2'-O-Methyl-guanosine
  modified_base 89: mod_base = OTHER; note = 2'-O-Methyl-guanosine
  modified_base 92: mod_base = OTHER; note = 2'-O-Methyl-guanosine
  modified_base 93: mod_base = OTHER; note = 2'-O-Methyl-guanosine
  modified_base 94: mod_base = OTHER; note = 2'-O-Methyl-uridine
  modified_base 95: mod_base = OTHER; note = 2'-O-Methyl-guanosine
  modified_base 96: mod_base = OTHER; note = 2'-O-Methyl-cytidine
  modified_base 97: mod_base = OTHER; note = 2'-O-Methyl-uridine phosphorothioate
  modified_base 98: mod_base = OTHER; note = 2'-O-Methyl-uridine phosphorothioate
  modified_base 99: mod_base = OTHER; note = 2'-O-Methyl-uridine phosphorothioate
  modified_base 100: mod_base = OTHER; note = 2'-O-Methyl-uridine

SEQ ID NO: 3148 - RNA, 100 nt, synthetic construct; identical to SEQ ID NO: 55
  source 1..100: mol_type = other RNA
  modified_base 1: mod_base = OTHER; note = 2'-O-Methyl-cytidine phosphorothioate
  modified_base 2: mod_base = OTHER; note = 2'-O-Methyl-adenosine phosphorothioate
  modified_base 3: mod_base = OTHER; note = 2'-O-Methyl-guanosine phosphorothioate
  modified_base 21: mod_base = OTHER; note = 2'-O-Methyl-guanosine
  modified_base 28: mod_base = OTHER; note = 2'-O-Methyl-adenosine
  modified_base 29: mod_base = OTHER; note = 2'-O-Methyl-guanosine
  modified_base 30: mod_base = OTHER; note = 2'-O-Methyl-cytidine
  modified_base 31: mod_base = OTHER; note = 2'-O-Methyl-uridine
  modified_base 32: mod_base = OTHER; note = 2'-O-Methyl-adenosine
  modified_base 33: mod_base = OTHER; note = 2'-O-Methyl-guanosine
  modified_base 34: mod_base = OTHER; note = 2'-O-Methyl-adenosine
  modified_base 35: mod_base = OTHER; note = 2'-O-Methyl-adenosine
  modified_base 36: mod_base = OTHER; note = 2'-O-Methyl-adenosine
  modified_base 37: mod_base = OTHER; note = 2'-O-Methyl-uridine
  modified_base 38: mod_base = OTHER; note = 2'-O-Methyl-adenosine
  modified_base 39: mod_base = OTHER; note = 2'-O-Methyl-guanosine
  modified_base 40: mod_base = OTHER; note = 2'-O-Methyl-cytidine
  modified_base 41: mod_base = OTHER; note = 2'-O-Methyl-adenosine
  modified_base 42: mod_base = OTHER; note = 2'-O-Methyl-adenosine
  modified_base 46: mod_base = OTHER; note = 2'-O-Methyl-adenosine
  modified_base 48: mod_base = OTHER; note = 2'-O-Methyl-adenosine
  modified_base 50: mod_base = OTHER; note = 2'-O-Methyl-uridine
  modified_base 52: mod_base = OTHER; note = 2'-O-Methyl-adenosine
  modified_base 53: mod_base = OTHER; note = 2'-O-Methyl-guanosine
  modified_base 54: mod_base = OTHER; note = 2'-O-Methyl-guanosine
  modified_base 55: mod_base = OTHER; note = 2'-O-Methyl-cytidine
  modified_base 56: mod_base = OTHER; note = 2'-O-Methyl-uridine
  modified_base 57: mod_base = OTHER; note = 2'-O-Methyl-adenosine
  modified_base 60: mod_base = OTHER; note = 2'-O-Methyl-cytidine
  modified_base 61: mod_base = OTHER; note = 2'-O-Methyl-cytidine
  modified_base 66: mod_base = OTHER; note = 2'-O-Methyl-uridine
  modified_base 67: mod_base = OTHER; note = 2'-O-Methyl-cytidine
  modified_base 70: mod_base = OTHER; note = 2'-O-Methyl-cytidine
  modified_base 71: mod_base = OTHER; note = 2'-O-Methyl-uridine
  modified_base 72: mod_base = OTHER; note = 2'-O-Methyl-uridine
  modified_base 73: mod_base = OTHER; note = 2'-O-Methyl-guanosine
  modified_base 74: mod_base = OTHER; note = 2'-O-Methyl-adenosine
  modified_base 75: mod_base = OTHER; note = 2'-O-Methyl-adenosine
  modified_base 76: mod_base = OTHER; note = 2'-O-Methyl-adenosine
  modified_base 77: mod_base = OTHER; note = 2'-O-Methyl-adenosine
  modified_base 78: mod_base = OTHER; note = 2'-O-Methyl-adenosine
  modified_base 79: mod_base = OTHER; note = 2'-O-Methyl-guanosine
  modified_base 80: mod_base = OTHER; note = 2'-O-Methyl-uridine
  modified_base 83: mod_base = OTHER; note = 2'-O-Methyl-cytidine
  modified_base 84: mod_base = OTHER; note = 2'-O-Methyl-adenosine
  modified_base 85: mod_base = OTHER; note = 2'-O-Methyl-cytidine
  modified_base 86: mod_base = OTHER; note = 2'-O-Methyl-cytidine
  modified_base 87: mod_base = OTHER; note = 2'-O-Methyl-guanosine
  modified_base 88: mod_base = OTHER; note = 2'-O-Methyl-adenosine
  modified_base 89: mod_base = OTHER; note = 2'-O-Methyl-guanosine
  modified_base 90: mod_base = OTHER; note = 2'-O-Methyl-uridine
  modified_base 91: mod_base = OTHER; note = 2'-O-Methyl-cytidine
  modified_base 92: mod_base = OTHER; note = 2'-O-Methyl-guanosine
  modified_base 93: mod_base = OTHER; note = 2'-O-Methyl-guanosine
  modified_base 94: mod_base = OTHER; note = 2'-O-Methyl-uridine
  modified_base 95: mod_base = OTHER; note = 2'-O-Methyl-guanosine
  modified_base 96: mod_base = OTHER; note = 2'-O-Methyl-cytidine
  modified_base 97: mod_base = OTHER; note = 2'-O-Methyl-uridine phosphorothioate
  modified_base 98: mod_base = OTHER; note = 2'-O-Methyl-uridine phosphorothioate
  modified_base 99: mod_base = OTHER; note = 2'-O-Methyl-uridine phosphorothioate
  modified_base 100: mod_base = OTHER; note = 2'-O-Methyl-uridine

SEQ ID NO: 3149 - RNA, 100 nt, synthetic construct; identical to SEQ ID NO: 452
  source 1..100: mol_type = other RNA
  modified_base 1: mod_base = OTHER; note = 2'-O-Methyl-cytidine phosphorothioate
  modified_base 2: mod_base = OTHER; note = 2'-O-Methyl-guanosine phosphorothioate
  modified_base 3: mod_base = OTHER; note = 2'-O-Methyl-cytidine phosphorothioate
  modified_base 29: mod_base = OTHER; note = 2'-O-Methyl-guanosine
  modified_base 30: mod_base = OTHER; note = 2'-O-Methyl-cytidine
  modified_base 31: mod_base = OTHER; note = 2'-O-Methyl-uridine
  modified_base 32: mod_base = OTHER; note = 2'-O-Methyl-adenosine
  modified_base 33: mod_base = OTHER; note = 2'-O-Methyl-guanosine
  modified_base 34: mod_base = OTHER; note = 2'-O-Methyl-adenosine
  modified_base 35: mod_base = OTHER; note = 2'-O-Methyl-adenosine
  modified_base 36: mod_base = OTHER; note = 2'-O-Methyl-adenosine
  modified_base 37: mod_base = OTHER; note = 2'-O-Methyl-uridine
  modified_base 38: mod_base = OTHER; note = 2'-O-Methyl-adenosine
  modified_base 39: mod_base = OTHER; note = 2'-O-Methyl-guanosine
  modified_base 40: mod_base = OTHER; note = 2'-O-Methyl-cytidine
  modified_base 69: mod_base = OTHER; note = 2'-O-Methyl-adenosine
  modified_base 70: mod_base = OTHER; note = 2'-O-Methyl-cytidine
  modified_base 71: mod_base = OTHER; note = 2'-O-Methyl-uridine
  modified_base 72: mod_base = OTHER; note = 2'-O-Methyl-uridine
  modified_base 73: mod_base = OTHER; note = 2'-O-Methyl-guanosine
  modified_base 74: mod_base = OTHER; note = 2'-O-Methyl-adenosine
  modified_base 75: mod_base = OTHER; note = 2'-O-Methyl-adenosine
  modified_base 76: mod_base = OTHER; note = 2'-O-Methyl-adenosine
  modified_base 77: mod_base = OTHER; note = 2'-O-Methyl-adenosine
  modified_base 78: mod_base = OTHER; note = 2'-O-Methyl-adenosine
  modified_base 79: mod_base = OTHER; note = 2'-O-Methyl-guanosine
  modified_base 80: mod_base = OTHER; note = 2'-O-Methyl-uridine
  modified_base 81: mod_base = OTHER; note = 2'-O-Methyl-guanosine
  modified_base 82: mod_base = OTHER; note = 2'-O-Methyl-guanosine
  modified_base 83: mod_base = OTHER; note = 2'-O-Methyl-cytidine
  modified_base 84: mod_base = OTHER; note = 2'-O-Methyl-adenosine
  modified_base 85: mod_base = OTHER; note = 2'-O-Methyl-cytidine
  modified_base 86: mod_base = OTHER; note = 2'-O-Methyl-cytidine
  modified_base 87: mod_base = OTHER; note = 2'-O-Methyl-guanosine
  modified_base 88: mod_base = OTHER; note = 2'-O-Methyl-adenosine
  modified_base 89: mod_base = OTHER; note = 2'-O-Methyl-guanosine
  modified_base 90: mod_base = OTHER; note = 2'-O-Methyl-uridine
  modified_base 91: mod_base = OTHER; note = 2'-O-Methyl-cytidine
  modified_base 92: mod_base = OTHER; note = 2'-O-Methyl-guanosine
  modified_base 93: mod_base = OTHER; note = 2'-O-Methyl-guanosine
  modified_base 94: mod_base = OTHER; note = 2'-O-Methyl-uridine
  modified_base 95: mod_base = OTHER; note = 2'-O-Methyl-guanosine
  modified_base 96: mod_base = OTHER; note = 2'-O-Methyl-cytidine
  modified_base 97: mod_base = OTHER; note = 2'-O-Methyl-uridine phosphorothioate
  modified_base 98: mod_base = OTHER; note = 2'-O-Methyl-uridine phosphorothioate
  modified_base 99: mod_base = OTHER; note = 2'-O-Methyl-uridine phosphorothioate
  modified_base 100: mod_base = OTHER; note = 2'-O-Methyl-uridine

SEQ ID NO: 3150 - RNA, 100 nt, synthetic construct; identical to SEQ ID NO: 341
  source 1..100: mol_type = other RNA
  modified_base 1: mod_base = OTHER; note = 2'-O-Methyl-cytidine phosphorothioate
  modified_base 2: mod_base = OTHER; note = 2'-O-Methyl-guanosine phosphorothioate
  modified_base 3: mod_base = OTHER; note = 2'-O-Methyl-uridine phosphorothioate
  modified_base 29: mod_base = OTHER; note = 2'-O-Methyl-guanosine
  modified_base 30: mod_base = OTHER; note = 2'-O-Methyl-cytidine
  modified_base 31: mod_base = OTHER; note = 2'-O-Methyl-uridine
  modified_base 32: mod_base = OTHER; note = 2'-O-Methyl-adenosine
  modified_base 33: mod_base = OTHER; note = 2'-O-Methyl-guanosine
  modified_base 34: mod_base = OTHER; note = 2'-O-Methyl-adenosine
  modified_base 35: mod_base = OTHER; note = 2'-O-Methyl-adenosine
  modified_base 36: mod_base = OTHER; note = 2'-O-Methyl-adenosine
  modified_base 37: mod_base = OTHER; note = 2'-O-Methyl-uridine
  modified_base 38: mod_base = OTHER; note = 2'-O-Methyl-adenosine
  modified_base 39: mod_base = OTHER; note = 2'-O-Methyl-guanosine
  modified_base 40: mod_base = OTHER; note = 2'-O-Methyl-cytidine
  modified_base 69: mod_base = OTHER; note = 2'-O-Methyl-adenosine
  modified_base 70: mod_base = OTHER; note = 2'-O-Methyl-cytidine
  modified_base 71: mod_base = OTHER; note = 2'-O-Methyl-uridine
  modified_base 72: mod_base = OTHER; note = 2'-O-Methyl-uridine
  modified_base 73: mod_base = OTHER; note = 2'-O-Methyl-guanosine
  modified_base 74: mod_base = OTHER; note = 2'-O-Methyl-adenosine
  modified_base 75: mod_base = OTHER; note = 2'-O-Methyl-adenosine
  modified_base 76: mod_base = OTHER; note = 2'-O-Methyl-adenosine
  modified_base 77: mod_base = OTHER; note = 2'-O-Methyl-adenosine
  modified_base 78: mod_base = OTHER; note = 2'-O-Methyl-adenosine
  modified_base 79: mod_base = OTHER; note = 2'-O-Methyl-guanosine
  modified_base 80: mod_base = OTHER; note = 2'-O-Methyl-uridine
  modified_base 81: mod_base = OTHER; note = 2'-O-Methyl-guanosine
  modified_base 82: mod_base = OTHER; note = 2'-O-Methyl-guanosine
  modified_base 83: mod_base = OTHER; note = 2'-O-Methyl-cytidine
  modified_base 84: mod_base = OTHER; note = 2'-O-Methyl-adenosine
  modified_base 85: mod_base = OTHER; note = 2'-O-Methyl-cytidine
  modified_base 86: mod_base = OTHER; note = 2'-O-Methyl-cytidine
  modified_base 87: mod_base = OTHER; note = 2'-O-Methyl-guanosine
  modified_base 88: mod_base = OTHER; note = 2'-O-Methyl-adenosine
  modified_base 89: mod_base = OTHER; note = 2'-O-Methyl-guanosine
  modified_base 90: mod_base = OTHER; note = 2'-O-Methyl-uridine
  modified_base 91: mod_base = OTHER; note = 2'-O-Methyl-cytidine
  modified_base 92: mod_base = OTHER; note = 2'-O-Methyl-guanosine
  modified_base 93: mod_base = OTHER; note = 2'-O-Methyl-guanosine
  modified_base 94: mod_base = OTHER; note = 2'-O-Methyl-uridine
  modified_base 95: mod_base = OTHER; note = 2'-O-Methyl-guanosine
  modified_base 96: mod_base = OTHER; note = 2'-O-Methyl-cytidine
  modified_base 97: mod_base = OTHER; note = 2'-O-Methyl-uridine phosphorothioate
  modified_base 98: mod_base = OTHER; note = 2'-O-Methyl-uridine phosphorothioate
  modified_base 99: mod_base = OTHER; note = 2'-O-Methyl-uridine phosphorothioate
  modified_base 100: mod_base = OTHER; note = 2'-O-Methyl-uridine

SEQ ID NO: 3151 - RNA, 100 nt, synthetic construct; identical to SEQ ID NO: 287
  source 1..100: mol_type = other RNA
  modified_base 1: mod_base = OTHER; note = 2'-O-Methyl-guanosine phosphorothioate
  modified_base 2: mod_base = OTHER; note = 2'-O-Methyl-cytidine phosphorothioate
  modified_base 3: mod_base = OTHER; note = 2'-O-Methyl-cytidine phosphorothioate
  modified_base 21: mod_base = OTHER; note = 2'-O-Methyl-guanosine
  modified_base 25: mod_base = OTHER; note = 2'-O-Methyl-uridine
  modified_base 28: mod_base = OTHER; note = 2'-O-Methyl-adenosine
  modified_base 29: mod_base = OTHER; note = 2'-O-Methyl-guanosine
  modified_base 30: mod_base = OTHER; note = 2'-O-Methyl-cytidine
  modified_base 31: mod_base = OTHER; note = 2'-O-Methyl-uridine
  modified_base 32: mod_base = OTHER; note = 2'-O-Methyl-adenosine
  modified_base 33: mod_base = OTHER; note = 2'-O-Methyl-guanosine
  modified_base 34: mod_base = OTHER; note = 2'-O-Methyl-adenosine
  modified_base 35: mod_base = OTHER; note = 2'-O-Methyl-adenosine
  modified_base 36: mod_base = OTHER; note = 2'-O-Methyl-adenosine
  modified_base 37: mod_base = OTHER; note = 2'-O-Methyl-uridine
  modified_base 38: mod_base = OTHER; note = 2'-O-Methyl-adenosine
  modified_base 39: mod_base = OTHER; note = 2'-O-Methyl-guanosine
  modified_base 40: mod_base = OTHER; note = 2'-O-Methyl-cytidine
  modified_base 41: mod_base = OTHER; note = 2'-O-Methyl-adenosine
  modified_base 42: mod_base = OTHER; note = 2'-O-Methyl-adenosine
  modified_base 46: mod_base = OTHER; note = 2'-O-Methyl-adenosine
  modified_base 48: mod_base = OTHER; note = 2'-O-Methyl-adenosine
  modified_base 50: mod_base = OTHER; note = 2'-O-Methyl-uridine
  modified_base 52: mod_base = OTHER; note = 2'-O-Methyl-adenosine
  modified_base 53: mod_base = OTHER; note = 2'-O-Methyl-guanosine
  modified_base 54: mod_base = OTHER; note = 2'-O-Methyl-guanosine
  modified_base 55: mod_base = OTHER; note = 2'-O-Methyl-cytidine
  modified_base 56: mod_base = OTHER; note = 2'-O-Methyl-uridine
  modified_base 57: mod_base = OTHER; note = 2'-O-Methyl-adenosine
  modified_base 60: mod_base = OTHER; note = 2'-O-Methyl-cytidine
  modified_base 61: mod_base = OTHER; note = 2'-O-Methyl-cytidine
  modified_base 66: mod_base = OTHER; note = 2'-O-Methyl-uridine
  modified_base 67: mod_base = OTHER; note = 2'-O-Methyl-cytidine
  modified_base 70: mod_base = OTHER; note = 2'-O-Methyl-cytidine
  modified_base 71: mod_base = OTHER; note = 2'-O-Methyl-uridine
  modified_base 72: mod_base = OTHER; note = 2'-O-Methyl-uridine
  modified_base 73: mod_base = OTHER; note = 2'-O-Methyl-guanosine
  modified_base 74: mod_base = OTHER; note = 2'-O-Methyl-adenosine
  modified_base 75: mod_base = OTHER; note = 2'-O-Methyl-adenosine
  modified_base 76: mod_base = OTHER; note = 2'-O-Methyl-adenosine
  modified_base 77: mod_base = OTHER; note = 2'-O-Methyl-adenosine
  modified_base 78: mod_base = OTHER; note = 2'-O-Methyl-adenosine
  modified_base 79: mod_base = OTHER; note = 2'-O-Methyl-guanosine
  modified_base 80: mod_base = OTHER; note = 2'-O-Methyl-uridine
  modified_base 81: mod_base = OTHER; note = 2'-O-Methyl-guanosine
  modified_base 83: mod_base = OTHER; note = 2'-O-Methyl-cytidine
  modified_base 84: mod_base = OTHER; note = 2'-O-Methyl-adenosine
  modified_base 85: mod_base = OTHER; note = 2'-O-Methyl-cytidine
  modified_base 86: mod_base = OTHER; note = 2'-O-Methyl-cytidine
  modified_base 87: mod_base = OTHER; note = 2'-O-Methyl-guanosine
  modified_base 88: mod_base = OTHER; note = 2'-O-Methyl-adenosine
  modified_base 89: mod_base = OTHER; note = 2'-O-Methyl-guanosine
  modified_base 90: mod_base = OTHER; note = 2'-O-Methyl-uridine
  modified_base 91: mod_base = OTHER; note = 2'-O-Methyl-cytidine
  modified_base 92: mod_base = OTHER; note = 2'-O-Methyl-guanosine
  modified_base 93: mod_base = OTHER; note = 2'-O-Methyl-guanosine
  modified_base 94: mod_base = OTHER; note = 2'-O-Methyl-uridine
  modified_base 95: mod_base = OTHER; note = 2'-O-Methyl-guanosine
  modified_base 96: mod_base = OTHER; note = 2'-O-Methyl-cytidine
  modified_base 97: mod_base = OTHER; note = 2'-O-Methyl-uridine phosphorothioate
  modified_base 98: mod_base = OTHER; note = 2'-O-Methyl-uridine phosphorothioate
  modified_base 99: mod_base = OTHER; note = 2'-O-Methyl-uridine phosphorothioate
  modified_base 100: mod_base = OTHER; note = 2'-O-Methyl-uridine

SEQ ID NO: 3152 - RNA, 100 nt, synthetic construct; identical to SEQ ID NO: 287
  source 1..100: mol_type = other RNA
  modified_base 1: mod_base = OTHER; note = 2'-O-Methyl-guanosine phosphorothioate
  modified_base 2: mod_base = OTHER; note = 2'-O-Methyl-cytidine phosphorothioate
  modified_base 3: mod_base = OTHER; note = 2'-O-Methyl-cytidine phosphorothioate
  modified_base 21: mod_base = OTHER; note = 2'-O-Methyl-guanosine
  modified_base 28: mod_base = OTHER; note = 2'-O-Methyl-adenosine
  modified_base 29: mod_base = OTHER; note = 2'-O-Methyl-guanosine
  modified_base 30: mod_base = OTHER; note = 2'-O-Methyl-cytidine
  modified_base 31: mod_base = OTHER; note = 2'-O-Methyl-uridine
  modified_base 32: mod_base = OTHER; note = 2'-O-Methyl-adenosine
  modified_base 33: mod_base = OTHER; note = 2'-O-Methyl-guanosine
  modified_base 34: mod_base = OTHER; note = 2'-O-Methyl-adenosine
  modified_base 35: mod_base = OTHER; note = 2'-O-Methyl-adenosine
  modified_base 36: mod_base = OTHER; note = 2'-O-Methyl-adenosine
  modified_base 37: mod_base = OTHER; note = 2'-O-Methyl-uridine
  modified_base 38: mod_base = OTHER; note = 2'-O-Methyl-adenosine
  modified_base 39: mod_base = OTHER; note = 2'-O-Methyl-guanosine
  modified_base 40: mod_base = OTHER; note = 2'-O-Methyl-cytidine
  modified_base 41: mod_base = OTHER; note = 2'-O-Methyl-adenosine
  modified_base 42: mod_base = OTHER; note = 2'-O-Methyl-adenosine
  modified_base 46: mod_base = OTHER; note = 2'-O-Methyl-adenosine
  modified_base 48: mod_base = OTHER; note = 2'-O-Methyl-adenosine
  modified_base 50: mod_base = OTHER; note = 2'-O-Methyl-uridine
  modified_base 52: mod_base = OTHER; note = 2'-O-Methyl-adenosine
  modified_base 53: mod_base = OTHER; note = 2'-O-Methyl-guanosine
  modified_base 54: mod_base = OTHER; note = 2'-O-Methyl-guanosine
  modified_base 55: mod_base = OTHER; note = 2'-O-Methyl-cytidine
  modified_base 56: mod_base = OTHER; note = 2'-O-Methyl-uridine
  modified_base 57: mod_base = OTHER; note = 2'-O-Methyl-adenosine
  modified_base 60: mod_base = OTHER; note = 2'-O-Methyl-cytidine
  modified_base 61: mod_base = OTHER; note = 2'-O-Methyl-cytidine
  modified_base 64: mod_base = OTHER; note = 2'-O-Methyl-uridine
  modified_base 66: mod_base = OTHER; note = 2'-O-Methyl-uridine
  modified_base 67: mod_base = OTHER; note = 2'-O-Methyl-cytidine
  modified_base 70: mod_base = OTHER; note = 2'-O-Methyl-cytidine
  modified_base 71: mod_base = OTHER; note = 2'-O-Methyl-uridine
  modified_base 72: mod_base = OTHER; note = 2'-O-Methyl-uridine
  modified_base 73: mod_base = OTHER; note = 2'-O-Methyl-guanosine
  modified_base 74: mod_base = OTHER; note = 2'-O-Methyl-adenosine
  modified_base 75: mod_base = OTHER; note = 2'-O-Methyl-adenosine
  modified_base 76: mod_base = OTHER; note = 2'-O-Methyl-adenosine
  modified_base 77: mod_base = OTHER; note = 2'-O-Methyl-adenosine
  modified_base 78: mod_base = OTHER; note = 2'-O-Methyl-adenosine
  modified_base 79: mod_base = OTHER; note = 2'-O-Methyl-guanosine
  modified_base 80: mod_base = OTHER; note = 2'-O-Methyl-uridine
  modified_base 81: mod_base = OTHER; note = 2'-O-Methyl-guanosine
  modified_base 83: mod_base = OTHER; note = 2'-O-Methyl-cytidine
  modified_base 84: mod_base = OTHER; note = 2'-O-Methyl-adenosine
  modified_base 85: mod_base = OTHER; note = 2'-O-Methyl-cytidine
  modified_base 86: mod_base = OTHER; note = 2'-O-Methyl-cytidine
  modified_base 87: mod_base = OTHER; note = 2'-O-Methyl-guanosine
  modified_base 88: mod_base = OTHER; note = 2'-O-Methyl-adenosine
  modified_base 89: mod_base = OTHER; note = 2'-O-Methyl-guanosine
  modified_base 90: mod_base = OTHER; note = 2'-O-Methyl-uridine
  modified_base 91: mod_base = OTHER; note = 2'-O-Methyl-cytidine
  modified_base 92: mod_base = OTHER; note = 2'-O-Methyl-guanosine
  modified_base 93: mod_base = OTHER; note = 2'-O-Methyl-guanosine
  modified_base 94: mod_base = OTHER; note = 2'-O-Methyl-uridine
  modified_base 95: mod_base = OTHER; note = 2'-O-Methyl-guanosine
  modified_base 96: mod_base = OTHER; note = 2'-O-Methyl-cytidine
  modified_base 97: mod_base = OTHER; note = 2'-O-Methyl-uridine phosphorothioate
  modified_base 98: mod_base = OTHER; note = 2'-O-Methyl-uridine phosphorothioate
  modified_base 99: mod_base = OTHER; note = 2'-O-Methyl-uridine phosphorothioate
  modified_base 100: mod_base = OTHER; note = 2'-O-Methyl-uridine

SEQ ID NO: 3153 - RNA, 100 nt, synthetic construct; identical to SEQ ID NO: 287
  source 1..100: mol_type = other RNA
  modified_base 1: mod_base = OTHER; note = 2'-O-Methyl-guanosine phosphorothioate
  modified_base 2: mod_base = OTHER; note = 2'-O-Methyl-cytidine phosphorothioate
  modified_base 3: mod_base = OTHER; note = 2'-O-Methyl-cytidine phosphorothioate
  modified_base 21: mod_base = OTHER; note = 2'-O-Methyl-guanosine
  modified_base 25: mod_base = OTHER; note = 2'-O-Methyl-uridine
  modified_base 28: mod_base = OTHER; note = 2'-O-Methyl-adenosine
  modified_base 29: mod_base = OTHER; note = 2'-O-Methyl-guanosine
  modified_base 30: mod_base = OTHER; note = 2'-O-Methyl-cytidine
  modified_base 31: mod_base = OTHER; note = 2'-O-Methyl-uridine
  modified_base 32: mod_base = OTHER; note = 2'-O-Methyl-adenosine
  modified_base 33: mod_base = OTHER; note = 2'-O-Methyl-guanosine
  modified_base 34: mod_base = OTHER; note = 2'-O-Methyl-adenosine
  modified_base 35: mod_base = OTHER; note = 2'-O-Methyl-adenosine
  modified_base 36: mod_base = OTHER; note = 2'-O-Methyl-adenosine
  modified_base 37: mod_base = OTHER; note = 2'-O-Methyl-uridine
  modified_base 38: mod_base = OTHER; note = 2'-O-Methyl-adenosine
  modified_base 39: mod_base = OTHER; note = 2'-O-Methyl-guanosine
  modified_base 40: mod_base = OTHER; note = 2'-O-Methyl-cytidine
  modified_base 41: mod_base = OTHER; note = 2'-O-Methyl-adenosine
  modified_base 42: mod_base = OTHER; note = 2'-O-Methyl-adenosine
  modified_base 46: mod_base = OTHER; note = 2'-O-Methyl-adenosine
  modified_base 48: mod_base = OTHER; note = 2'-O-Methyl-adenosine
  modified_base 50: mod_base = OTHER; note = 2'-O-Methyl-uridine
  modified_base 52: mod_base = OTHER; note = 2'-O-Methyl-adenosine
  modified_base 53: mod_base = OTHER; note = 2'-O-Methyl-guanosine
  modified_base 54: mod_base = OTHER; note = 2'-O-Methyl-guanosine
  modified_base 55: mod_base = OTHER; note = 2'-O-Methyl-cytidine
  modified_base 56: mod_base = OTHER; note = 2'-O-Methyl-uridine
  modified_base 57: mod_base = OTHER; note = 2'-O-Methyl-adenosine
  modified_base 60: mod_base = OTHER; note = 2'-O-Methyl-cytidine
  modified_base 61: mod_base = OTHER; note = 2'-O-Methyl-cytidine
  modified_base 64: mod_base = OTHER; note = 2'-O-Methyl-uridine
  modified_base 66: mod_base = OTHER; note = 2'-O-Methyl-uridine
  modified_base 67: mod_base = OTHER; note = 2'-O-Methyl-cytidine
  modified_base 70: mod_base = OTHER; note = 2'-O-Methyl-cytidine
  modified_base 71: mod_base = OTHER; note = 2'-O-Methyl-uridine
  modified_base 72: mod_base = OTHER; note = 2'-O-Methyl-uridine
  modified_base 73: mod_base = OTHER; note = 2'-O-Methyl-guanosine
  modified_base 74: mod_base = OTHER; note = 2'-O-Methyl-adenosine
  modified_base 75: mod_base = OTHER; note = 2'-O-Methyl-adenosine
  modified_base 76: mod_base = OTHER; note = 2'-O-Methyl-adenosine
  modified_base 77: mod_base = OTHER; note = 2'-O-Methyl-adenosine
  modified_base 78: mod_base = OTHER; note = 2'-O-Methyl-adenosine
  modified_base 79: mod_base = OTHER; note = 2'-O-Methyl-guanosine
  modified_base 80: mod_base = OTHER; note = 2'-O-Methyl-uridine
  modified_base 81: mod_base = OTHER; note = 2'-O-Methyl-guanosine
  modified_base 83: mod_base = OTHER; note = 2'-O-Methyl-cytidine
  modified_base 84: mod_base = OTHER; note = 2'-O-Methyl-adenosine
  modified_base 85: mod_base = OTHER; note = 2'-O-Methyl-cytidine
  modified_base 86: mod_base = OTHER; note = 2'-O-Methyl-cytidine
  modified_base 87: mod_base = OTHER; note = 2'-O-Methyl-guanosine
  modified_base 88: mod_base = OTHER; note = 2'-O-Methyl-adenosine
  modified_base 89: mod_base = OTHER; note = 2'-O-Methyl-guanosine
  modified_base 90: mod_base = OTHER; note = 2'-O-Methyl-uridine
  modified_base 91: mod_base = OTHER; note = 2'-O-Methyl-cytidine
  modified_base 92: mod_base = OTHER; note = 2'-O-Methyl-guanosine
  modified_base 93: mod_base = OTHER; note = 2'-O-Methyl-guanosine
  modified_base 94: mod_base = OTHER; note = 2'-O-Methyl-uridine
  modified_base 95: mod_base = OTHER; note = 2'-O-Methyl-guanosine
  modified_base 96: mod_base = OTHER; note = 2'-O-Methyl-cytidine
  modified_base 97: mod_base = OTHER; note = 2'-O-Methyl-uridine phosphorothioate
  modified_base 98: mod_base = OTHER; note = 2'-O-Methyl-uridine phosphorothioate
  modified_base 99: mod_base = OTHER; note = 2'-O-Methyl-uridine phosphorothioate
  modified_base 100: mod_base = OTHER; note = 2'-O-Methyl-uridine

SEQ ID NO: 3154 - RNA, 100 nt, synthetic construct; identical to SEQ ID NO: 287
  source 1..100: mol_type = other RNA
  modified_base 1: mod_base = OTHER; note = 2'-O-Methyl-guanosine phosphorothioate
  modified_base 2: mod_base = OTHER; note = 2'-O-Methyl-cytidine phosphorothioate
  modified_base 3: mod_base = OTHER; note = 2'-O-Methyl-cytidine phosphorothioate
  modified_base 21: mod_base = OTHER; note = 2'-O-Methyl-guanosine
  modified_base 25: mod_base = OTHER; note = 2'-O-Methyl-uridine
  modified_base 28: mod_base = OTHER; note = 2'-O-Methyl-adenosine
  modified_base 29: mod_base = OTHER; note = 2'-O-Methyl-guanosine
  modified_base 30: mod_base = OTHER; note = 2'-O-Methyl-cytidine
  modified_base 31: mod_base = OTHER; note = 2'-O-Methyl-uridine
  modified_base 32: mod_base = OTHER; note = 2'-O-Methyl-adenosine
  modified_base 33: mod_base = OTHER; note = 2'-O-Methyl-guanosine
  modified_base 34: mod_base = OTHER; note = 2'-O-Methyl-adenosine
  modified_base 35: mod_base = OTHER; note = 2'-O-Methyl-adenosine
  modified_base 36: mod_base = OTHER; note = 2'-O-Methyl-adenosine
  modified_base 37: mod_base = OTHER; note = 2'-O-Methyl-uridine
  modified_base 38: mod_base = OTHER; note = 2'-O-Methyl-adenosine
  modified_base 39: mod_base = OTHER; note = 2'-O-Methyl-guanosine
  modified_base 40: mod_base = OTHER; note = 2'-O-Methyl-cytidine
  modified_base 41: mod_base = OTHER; note = 2'-O-Methyl-adenosine
  modified_base 42: mod_base = OTHER; note = 2'-O-Methyl-adenosine
  modified_base 45: mod_base = OTHER; note = 2'-O-Methyl-uridine
  modified_base 46: mod_base = OTHER; note = 2'-O-Methyl-adenosine
  modified_base 48: mod_base = OTHER; note = 2'-O-Methyl-adenosine
  modified_base 50: mod_base = OTHER; note = 2'-O-Methyl-uridine
  modified_base 52: mod_base = OTHER; note = 2'-O-Methyl-adenosine
  modified_base 53: mod_base = OTHER; note = 2'-O-Methyl-guanosine
  modified_base 54: mod_base = OTHER; note = 2'-O-Methyl-guanosine
  modified_base 55: mod_base = OTHER; note = 2'-O-Methyl-cytidine
  modified_base 56: mod_base = OTHER; note = 2'-O-Methyl-uridine
  modified_base 57: mod_base = OTHER; note = 2'-O-Methyl-adenosine
  modified_base 60: mod_base = OTHER; note = 2'-O-Methyl-cytidine
  modified_base 61: mod_base = OTHER; note = 2'-O-Methyl-cytidine
  modified_base 66: mod_base = OTHER; note = 2'-O-Methyl-uridine
  modified_base 67: mod_base = OTHER; note = 2'-O-Methyl-cytidine
  modified_base 70: mod_base = OTHER; note = 2'-O-Methyl-cytidine
  modified_base 71: mod_base = OTHER; note = 2'-O-Methyl-uridine
  modified_base 72: mod_base = OTHER; note = 2'-O-Methyl-uridine
  modified_base 73: mod_base = OTHER; note = 2'-O-Methyl-guanosine
  modified_base 74: mod_base = OTHER; note = 2'-O-Methyl-adenosine
  modified_base 75: mod_base = OTHER; note = 2'-O-Methyl-adenosine
  modified_base 76: mod_base = OTHER; note = 2'-O-Methyl-adenosine
  modified_base 77: mod_base = OTHER; note = 2'-O-Methyl-adenosine
  modified_base 78: mod_base = OTHER; note = 2'-O-Methyl-adenosine
  modified_base 79: mod_base = OTHER; note = 2'-O-Methyl-guanosine
  modified_base 80: mod_base = OTHER; note = 2'-O-Methyl-uridine
  modified_base 81: mod_base = OTHER; note = 2'-O-Methyl-guanosine
  modified_base 83: mod_base = OTHER; note = 2'-O-Methyl-cytidine
  modified_base 84: mod_base = OTHER; note = 2'-O-Methyl-adenosine
  modified_base 85: mod_base = OTHER; note = 2'-O-Methyl-cytidine
  modified_base 86: mod_base = OTHER; note = 2'-O-Methyl-cytidine
  modified_base 87: mod_base = OTHER; note = 2'-O-Methyl-guanosine
  modified_base 88: mod_base = OTHER; note = 2'-O-Methyl-adenosine
  modified_base 89: mod_base = OTHER; note = 2'-O-Methyl-guanosine
  modified_base 90: mod_base = OTHER; note = 2'-O-Methyl-uridine
  modified_base 91: mod_base = OTHER; note = 2'-O-Methyl-cytidine
  modified_base 92: mod_base = OTHER; note = 2'-O-Methyl-guanosine
  modified_base 93: mod_base = OTHER; note = 2'-O-Methyl-guanosine
  modified_base 94: mod_base = OTHER; note = 2'-O-Methyl-uridine
  modified_base 95: mod_base = OTHER; note = 2'-O-Methyl-guanosine
  modified_base 96: mod_base = OTHER; note = 2'-O-Methyl-cytidine
  modified_base 97: mod_base = OTHER; note = 2'-O-Methyl-uridine phosphorothioate
  modified_base 98: mod_base = OTHER; note = 2'-O-Methyl-uridine phosphorothioate
  modified_base 99: mod_base = OTHER; note = 2'-O-Methyl-uridine phosphorothioate
  modified_base 100: mod_base = OTHER; note = 2'-O-Methyl-uridine

SEQ ID NO: 3155 - RNA, 100 nt, synthetic construct; identical to SEQ ID NO: 287
  source 1..100: mol_type = other RNA
  modified_base 1: mod_base = OTHER; note = 2'-O-Methyl-guanosine phosphorothioate
  modified_base 2: mod_base = OTHER; note = 2'-O-Methyl-cytidine phosphorothioate
  modified_base 3: mod_base = OTHER; note = 2'-O-Methyl-cytidine phosphorothioate
  modified_base 21: mod_base = OTHER; note = 2'-O-Methyl-guanosine
  modified_base 28: mod_base = OTHER; note = 2'-O-Methyl-adenosine
  modified_base 29: mod_base = OTHER; note = 2'-O-Methyl-guanosine
  modified_base 30: mod_base = OTHER; note = 2'-O-Methyl-cytidine
  modified_base 31: mod_base = OTHER; note = 2'-O-Methyl-uridine
  modified_base 32: mod_base = OTHER; note = 2'-O-Methyl-adenosine
  modified_base 33: mod_base = OTHER; note = 2'-O-Methyl-guanosine
  modified_base 34: mod_base = OTHER; note = 2'-O-Methyl-adenosine
  modified_base 35: mod_base = OTHER; note = 2'-O-Methyl-adenosine
  modified_base 36: mod_base = OTHER; note = 2'-O-Methyl-adenosine
  modified_base 37: mod_base = OTHER; note = 2'-O-Methyl-uridine
  modified_base 38: mod_base = OTHER; note = 2'-O-Methyl-adenosine
  modified_base 39: mod_base = OTHER; note = 2'-O-Methyl-guanosine
  modified_base 40: mod_base = OTHER; note = 2'-O-Methyl-cytidine
  modified_base 41: mod_base = OTHER; note = 2'-O-Methyl-adenosine
  modified_base 42: mod_base = OTHER; note = 2'-O-Methyl-adenosine
  modified_base 45: mod_base = OTHER; note = 2'-O-Methyl-uridine
  modified_base 46: mod_base = OTHER; note = 2'-O-Methyl-adenosine
  modified_base 48: mod_base = OTHER; note = 2'-O-Methyl-adenosine
  modified_base 50: mod_base = OTHER; note = 2'-O-Methyl-uridine
  modified_base 52: mod_base = OTHER; note = 2'-O-Methyl-adenosine
  modified_base 53: mod_base = OTHER; note = 2'-O-Methyl-guanosine
  modified_base 54: mod_base = OTHER; note = 2'-O-Methyl-guanosine
  modified_base 55: mod_base = OTHER; note = 2'-O-Methyl-cytidine
  modified_base 56: mod_base = OTHER; note = 2'-O-Methyl-uridine
  modified_base 57: mod_base = OTHER; note = 2'-O-Methyl-adenosine
  modified_base 60: mod_base = OTHER; note = 2'-O-Methyl-cytidine
  modified_base 61: mod_base = OTHER; note = 2'-O-Methyl-cytidine
  modified_base 64: mod_base = OTHER; note = 2'-O-Methyl-uridine
  modified_base 66: mod_base = OTHER; note = 2'-O-Methyl-uridine
  modified_base 67: mod_base = OTHER; note = 2'-O-Methyl-cytidine
  modified_base 70: mod_base = OTHER; note = 2'-O-Methyl-cytidine
  modified_base 71: mod_base = OTHER; note = 2'-O-Methyl-uridine
  modified_base 72: mod_base = OTHER; note = 2'-O-Methyl-uridine
  modified_base 73: mod_base = OTHER; note = 2'-O-Methyl-guanosine
  modified_base 74: mod_base = OTHER; note = 2'-O-Methyl-adenosine
  modified_base 75: mod_base = OTHER; note = 2'-O-Methyl-adenosine
  modified_base 76: mod_base = OTHER; note = 2'-O-Methyl-adenosine
  modified_base 77: mod_base = OTHER; note = 2'-O-Methyl-adenosine
  modified_base 78: mod_base = OTHER; note = 2'-O-Methyl-adenosine
  modified_base 79: mod_base = OTHER; note = 2'-O-Methyl-guanosine
  modified_base 80: mod_base = OTHER; note = 2'-O-Methyl-uridine
  modified_base 81: mod_base = OTHER; note = 2'-O-Methyl-guanosine
  modified_base 83: mod_base = OTHER; note = 2'-O-Methyl-cytidine
  modified_base 84: mod_base = OTHER; note = 2'-O-Methyl-adenosine
  modified_base 85: mod_base = OTHER; note = 2'-O-Methyl-cytidine
  modified_base 86: mod_base = OTHER; note = 2'-O-Methyl-cytidine
  modified_base 87: mod_base = OTHER; note = 2'-O-Methyl-guanosine
  modified_base 88: mod_base = OTHER; note = 2'-O-Methyl-adenosine
  modified_base 89: mod_base = OTHER; note = 2'-O-Methyl-guanosine
  modified_base 90: mod_base = OTHER; note = 2'-O-Methyl-uridine
  modified_base 91: mod_base = OTHER; note = 2'-O-Methyl-cytidine
  modified_base 92: mod_base = OTHER; note = 2'-O-Methyl-guanosine
  modified_base 93: mod_base = OTHER; note = 2'-O-Methyl-guanosine
  modified_base 94: mod_base = OTHER; note = 2'-O-Methyl-uridine
  modified_base 95: mod_base = OTHER; note = 2'-O-Methyl-guanosine
  modified_base 96: mod_base = OTHER; note = 2'-O-Methyl-cytidine
  modified_base 97: mod_base = OTHER; note = 2'-O-Methyl-uridine phosphorothioate
  modified_base 98: mod_base = OTHER; note = 2'-O-Methyl-uridine phosphorothioate
  modified_base 99: mod_base = OTHER; note = 2'-O-Methyl-uridine phosphorothioate
  modified_base 100: mod_base = OTHER; note = 2'-O-Methyl-uridine

SEQ ID NO: 3156 - RNA, 100 nt, synthetic construct; identical to SEQ ID NO: 287
  source 1..100: mol_type = other RNA
  modified_base 1: mod_base = OTHER; note = 2'-O-Methyl-guanosine phosphorothioate
  modified_base 2: mod_base = OTHER; note = 2'-O-Methyl-cytidine phosphorothioate
  modified_base 3: mod_base = OTHER; note = 2'-O-Methyl-cytidine phosphorothioate
  modified_base 21: mod_base = OTHER; note = 2'-O-Methyl-guanosine
  modified_base 25: mod_base = OTHER; note = 2'-O-Methyl-uridine
  modified_base 28: mod_base = OTHER; note = 2'-O-Methyl-adenosine
  modified_base 29: mod_base = OTHER; note = 2'-O-Methyl-guanosine
  modified_base 30: mod_base = OTHER; note = 2'-O-Methyl-cytidine
  modified_base 31: mod_base = OTHER; note = 2'-O-Methyl-uridine
  modified_base 32: mod_base = OTHER; note = 2'-O-Methyl-adenosine
  modified_base 33: mod_base = OTHER; note = 2'-O-Methyl-guanosine
  modified_base 34: mod_base = OTHER; note = 2'-O-Methyl-adenosine
  modified_base 35: mod_base = OTHER; note = 2'-O-Methyl-adenosine
  modified_base 36: mod_base = OTHER; note = 2'-O-Methyl-adenosine
  modified_base 37: mod_base = OTHER; note = 2'-O-Methyl-uridine
  modified_base 38: mod_base = OTHER; note = 2'-O-Methyl-adenosine
  modified_base 39: mod_base = OTHER; note = 2'-O-Methyl-guanosine
  modified_base 40: mod_base = OTHER; note = 2'-O-Methyl-cytidine
  modified_base 41: mod_base = OTHER; note = 2'-O-Methyl-adenosine
  modified_base 42: mod_base = OTHER; note = 2'-O-Methyl-adenosine
  modified_base 45: mod_base = OTHER; note = 2'-O-Methyl-uridine
  modified_base 46: mod_base = OTHER; note = 2'-O-Methyl-adenosine
  modified_base 48: mod_base = OTHER; note = 2'-O-Methyl-adenosine
  modified_base 50: mod_base = OTHER; note = 2'-O-Methyl-uridine
  modified_base 52: mod_base = OTHER; note = 2'-O-Methyl-adenosine
  modified_base 53: mod_base = OTHER; note = 2'-O-Methyl-guanosine
  modified_base 54: mod_base = OTHER; note = 2'-O-Methyl-guanosine
  modified_base 55: mod_base = OTHER; note = 2'-O-Methyl-cytidine
  modified_base 56: mod_base = OTHER; note = 2'-O-Methyl-uridine
  modified_base 57: mod_base = OTHER; note = 2'-O-Methyl-adenosine
  modified_base 60: mod_base = OTHER; note = 2'-O-Methyl-cytidine
  modified_base 61: mod_base = OTHER; note = 2'-O-Methyl-cytidine
  modified_base 64: mod_base = OTHER; note = 2'-O-Methyl-uridine
  modified_base 66: mod_base = OTHER; note = 2'-O-Methyl-uridine
  modified_base 67: mod_base = OTHER; note = 2'-O-Methyl-cytidine
  modified_base 70: mod_base = OTHER; note = 2'-O-Methyl-cytidine
  modified_base 71: mod_base = OTHER; note = 2'-O-Methyl-uridine
  modified_base 72: mod_base = OTHER; note = 2'-O-Methyl-uridine
  modified_base 73: mod_base = OTHER; note = 2'-O-Methyl-guanosine
  modified_base 74: mod_base = OTHER; note = 2'-O-Methyl-adenosine
  modified_base 75: mod_base = OTHER; note = 2'-O-Methyl-adenosine
  modified_base 76: mod_base = OTHER; note = 2'-O-Methyl-adenosine
  modified_base 77: mod_base = OTHER; note = 2'-O-Methyl-adenosine
  modified_base 78: mod_base = OTHER; note = 2'-O-Methyl-adenosine
  modified_base 79: mod_base = OTHER; note = 2'-O-Methyl-guanosine
  modified_base 80: mod_base = OTHER; note = 2'-O-Methyl-uridine
  modified_base 81: mod_base = OTHER; note = 2'-O-Methyl-guanosine
  modified_base 83: mod_base = OTHER; note = 2'-O-Methyl-cytidine
  modified_base 84: mod_base = OTHER; note = 2'-O-Methyl-adenosine
  modified_base 85: mod_base = OTHER; note = 2'-O-Methyl-cytidine
  modified_base 86: mod_base = OTHER; note = 2'-O-Methyl-cytidine
  modified_base 87: mod_base = OTHER; note = 2'-O-Methyl-guanosine
  modified_base 88: mod_base = OTHER; note = 2'-O-Methyl-adenosine
  modified_base 89: mod_base = OTHER; note = 2'-O-Methyl-guanosine
  modified_base 90: mod_base = OTHER; note = 2'-O-Methyl-uridine
  modified_base 91: mod_base = OTHER; note = 2'-O-Methyl-cytidine
  modified_base 92: mod_base = OTHER; note = 2'-O-Methyl-guanosine
  modified_base 93: mod_base = OTHER; note = 2'-O-Methyl-guanosine
  modified_base 94: mod_base = OTHER; note = 2'-O-Methyl-uridine
  modified_base 95: mod_base = OTHER; note = 2'-O-Methyl-guanosine
  modified_base 96: mod_base = OTHER; note = 2'-O-Methyl-cytidine
  modified_base 97: mod_base = OTHER; note = 2'-O-Methyl-uridine phosphorothioate
  modified_base 98: mod_base = OTHER; note = 2'-O-Methyl-uridine phosphorothioate
  modified_base 99: mod_base = OTHER; note = 2'-O-Methyl-uridine phosphorothioate
  modified_base 100: mod_base = OTHER; note = 2'-O-Methyl-uridine

SEQ ID NO: 3157 - RNA, 100 nt, synthetic construct; identical to SEQ ID NO: 287
  source 1..100: mol_type = other RNA
  modified_base 1: mod_base = OTHER; note = 2'-O-Methyl-guanosine phosphorothioate
  modified_base 2: mod_base = OTHER; note = 2'-O-Methyl-cytidine phosphorothioate
  modified_base 3: mod_base = OTHER; note = 2'-O-Methyl-cytidine phosphorothioate
  modified_base 6: mod_base = OTHER; note = 2'-O-Methyl-uridine
  modified_base 16: mod_base = OTHER; note = 2'-O-Methyl-cytidine
  modified_base 21: mod_base = OTHER; note = 2'-O-Methyl-guanosine
  modified_base 28: mod_base = OTHER; note = 2'-O-Methyl-adenosine
  modified_base 29: mod_base = OTHER; note = 2'-O-Methyl-guanosine
  modified_base 30: mod_base = OTHER; note = 2'-O-Methyl-cytidine
  modified_base 31: mod_base = OTHER; note = 2'-O-Methyl-uridine
  modified_base 32: mod_base = OTHER; note = 2'-O-Methyl-adenosine
  modified_base 33: mod_base = OTHER; note = 2'-O-Methyl-guanosine
  modified_base 34: mod_base = OTHER; note = 2'-O-Methyl-adenosine
  modified_base 35: mod_base = OTHER; note = 2'-O-Methyl-adenosine
  modified_base 36: mod_base = OTHER; note = 2'-O-Methyl-adenosine
  modified_base 37: mod_base = OTHER; note = 2'-O-Methyl-uridine
  modified_base 38: mod_base = OTHER; note = 2'-O-Methyl-adenosine
  modified_base 39: mod_base = OTHER; note = 2'-O-Methyl-guanosine
  modified_base 40: mod_base = OTHER; note = 2'-O-Methyl-cytidine
  modified_base 41: mod_base = OTHER; note = 2'-O-Methyl-adenosine
  modified_base 42: mod_base = OTHER; note = 2'-O-Methyl-adenosine
  modified_base 46: mod_base = OTHER; note = 2'-O-Methyl-adenosine
  modified_base 48: mod_base = OTHER; note = 2'-O-Methyl-adenosine
  modified_base 50: mod_base = OTHER; note = 2'-O-Methyl-uridine
  modified_base 52: mod_base = OTHER; note = 2'-O-Methyl-adenosine
  modified_base 53: mod_base = OTHER; note = 2'-O-Methyl-guanosine
  modified_base 54: mod_base = OTHER; note = 2'-O-Methyl-guanosine
  modified_base 55: mod_base = OTHER; note = 2'-O-Methyl-cytidine
  modified_base 56: mod_base = OTHER; note = 2'-O-Methyl-uridine
  modified_base 57: mod_base = OTHER; note = 2'-O-Methyl-adenosine
  modified_base 60: mod_base = OTHER; note = 2'-O-Methyl-cytidine
  modified_base 61: mod_base = OTHER; note = 2'-O-Methyl-cytidine
  modified_base 66: mod_base = OTHER; note = 2'-O-Methyl-uridine
  modified_base 67: mod_base = OTHER; note = 2'-O-Methyl-cytidine
  modified_base 70: mod_base = OTHER; note = 2'-O-Methyl-cytidine
  modified_base 71: mod_base = OTHER; note = 2'-O-Methyl-uridine
  modified_base 72: mod_base = OTHER; note = 2'-O-Methyl-uridine
  modified_base 73: mod_base = OTHER; note = 2'-O-Methyl-guanosine
  modified_base 74: mod_base = OTHER; note = 2'-O-Methyl-adenosine
  modified_base 75: mod_base = OTHER; note = 2'-O-Methyl-adenosine
  modified_base 76: mod_base = OTHER; note = 2'-O-Methyl-adenosine
  modified_base 77: mod_base = OTHER; note = 2'-O-Methyl-adenosine
  modified_base 78: mod_base = OTHER; note = 2'-O-Methyl-adenosine
  modified_base 79: mod_base = OTHER; note = 2'-O-Methyl-guanosine
  modified_base 80: mod_base = OTHER; note = 2'-O-Methyl-uridine
  modified_base 81: mod_base = OTHER; note = 2'-O-Methyl-guanosine
  modified_base 83: mod_base = OTHER; note = 2'-O-Methyl-cytidine
  modified_base 84: mod_base = OTHER; note = 2'-O-Methyl-adenosine
  modified_base 85: mod_base = OTHER; note = 2'-O-Methyl-cytidine
  modified_base 86: mod_base = OTHER; note = 2'-O-Methyl-cytidine
  modified_base 87: mod_base = OTHER; note = 2'-O-Methyl-guanosine
  modified_base 88: mod_base = OTHER; note = 2'-O-Methyl-adenosine
  modified_base 89: mod_base = OTHER; note = 2'-O-Methyl-guanosine
  modified_base 90: mod_base = OTHER; note = 2'-O-Methyl-uridine
  modified_base 91: mod_base = OTHER; note = 2'-O-Methyl-cytidine
  modified_base 92: mod_base = OTHER; note = 2'-O-Methyl-guanosine
  modified_base 93: mod_base = OTHER; note = 2'-O-Methyl-guanosine
  modified_base 94: mod_base = OTHER; note = 2'-O-Methyl-uridine
  modified_base 95: mod_base = OTHER; note = 2'-O-Methyl-guanosine
  modified_base 96: mod_base = OTHER; note = 2'-O-Methyl-cytidine
  modified_base 97: mod_base = OTHER; note = 2'-O-Methyl-uridine phosphorothioate
  modified_base 98: mod_base = OTHER; note = 2'-O-Methyl-uridine phosphorothioate
  modified_base 99: mod_base = OTHER; note = 2'-O-Methyl-uridine phosphorothioate
  modified_base 100: mod_base = OTHER; note = 2'-O-Methyl-uridine

SEQ ID NO: 3158 - RNA, 100 nt, synthetic construct; identical to SEQ ID NO: 287
  source 1..100: mol_type = other RNA
  modified_base 1: mod_base = OTHER; note = 2'-O-Methyl-guanosine phosphorothioate
  modified_base 2: mod_base = OTHER; note = 2'-O-Methyl-cytidine phosphorothioate
  modified_base 3: mod_base = OTHER; note = 2'-O-Methyl-cytidine phosphorothioate
  modified_base 6: mod_base = OTHER; note = 2'-O-Methyl-uridine
  modified_base 16: mod_base = OTHER; note = 2'-O-Methyl-cytidine
  modified_base 21: mod_base = OTHER; note = 2'-O-Methyl-guanosine
  modified_base 28: mod_base = OTHER; note = 2'-O-Methyl-adenosine
  modified_base 29: mod_base = OTHER; note = 2'-O-Methyl-guanosine
  modified_base 30: mod_base = OTHER; note = 2'-O-Methyl-cytidine
  modified_base 31: mod_base = OTHER; note = 2'-O-Methyl-uridine
  modified_base 32: mod_base = OTHER; note = 2'-O-Methyl-adenosine
  modified_base 33: mod_base = OTHER; note = 2'-O-Methyl-guanosine
  modified_base 34: mod_base = OTHER; note = 2'-O-Methyl-adenosine
  modified_base 35: mod_base = OTHER; note = 2'-O-Methyl-adenosine
  modified_base 36: mod_base = OTHER; note = 2'-O-Methyl-adenosine
  modified_base 37: mod_base = OTHER; note = 2'-O-Methyl-uridine
  modified_base 38: mod_base = OTHER; note = 2'-O-Methyl-adenosine
  modified_base 39: mod_base = OTHER; note = 2'-O-Methyl-guanosine
  modified_base 40: mod_base = OTHER; note = 2'-O-Methyl-cytidine
  modified_base 41: mod_base = OTHER; note = 2'-O-Methyl-adenosine
  modified_base 42: mod_base = OTHER; note = 2'-O-Methyl-adenosine
  modified_base 45: mod_base = OTHER; note = uridine phosphorothioate
  modified_base 46: mod_base = OTHER; note = 2'-O-Methyl-adenosine
  modified_base 48: mod_base = OTHER; note = 2'-O-Methyl-adenosine
  modified_base 50: mod_base = OTHER; note = 2'-O-Methyl-uridine
  modified_base 52: mod_base = OTHER; note = 2'-O-Methyl-adenosine
  modified_base 53: mod_base = OTHER; note = 2'-O-Methyl-guanosine
  modified_base 54: mod_base = OTHER; note = 2'-O-Methyl-guanosine
  modified_base 55: mod_base = OTHER; note = 2'-O-Methyl-cytidine
  modified_base 56: mod_base = OTHER; note = 2'-O-Methyl-uridine
  modified_base 57: mod_base = OTHER; note = 2'-O-Methyl-adenosine
  modified_base 60: mod_base = OTHER; note = 2'-O-Methyl-cytidine
  modified_base 61: mod_base = OTHER; note = 2'-O-Methyl-cytidine
  modified_base 64: mod_base = OTHER; note = uridine phosphorothioate
  modified_base 66: mod_base = OTHER; note = 2'-O-Methyl-uridine
  modified_base 67: mod_base = OTHER; note = 2'-O-Methyl-cytidine
  modified_base 70: mod_base = OTHER; note = 2'-O-Methyl-cytidine
  modified_base 71: mod_base = OTHER; note = 2'-O-Methyl-uridine
  modified_base 72: mod_base = OTHER; note = 2'-O-Methyl-uridine
  modified_base 73: mod_base = OTHER; note = 2'-O-Methyl-guanosine
  modified_base 74: mod_base = OTHER; note = 2'-O-Methyl-adenosine
  modified_base 75: mod_base = OTHER; note = 2'-O-Methyl-adenosine
  modified_base 76: mod_base = OTHER; note = 2'-O-Methyl-adenosine
  modified_base 77: mod_base = OTHER; note = 2'-O-Methyl-adenosine
  modified_base 78: mod_base = OTHER; note = 2'-O-Methyl-adenosine
  modified_base 79: mod_base = OTHER; note = 2'-O-Methyl-guanosine
  modified_base 80: mod_base = OTHER; note = 2'-O-Methyl-uridine
  modified_base 81: mod_base = OTHER; note = 2'-O-Methyl-guanosine
  modified_base 83: mod_base = OTHER; note = 2'-O-Methyl-cytidine
  modified_base 84: mod_base = OTHER; note = 2'-O-Methyl-adenosine
  modified_base 85: mod_base = OTHER; note = 2'-O-Methyl-cytidine
  modified_base 86: mod_base = OTHER; note = 2'-O-Methyl-cytidine
  modified_base 87: mod_base = OTHER; note = 2'-O-Methyl-guanosine
  modified_base 88: mod_base = OTHER; note = 2'-O-Methyl-adenosine
  modified_base 89: mod_base = OTHER; note = 2'-O-Methyl-guanosine
  modified_base 90: mod_base = OTHER; note = 2'-O-Methyl-uridine
  modified_base 91: mod_base = OTHER; note = 2'-O-Methyl-cytidine
  modified_base 92: mod_base = OTHER; note = 2'-O-Methyl-guanosine
  modified_base 93: mod_base = OTHER; note = 2'-O-Methyl-guanosine
  modified_base 94: mod_base = OTHER; note = 2'-O-Methyl-uridine
  modified_base 95: mod_base = OTHER; note = 2'-O-Methyl-guanosine
  modified_base 96: mod_base = OTHER; note = 2'-O-Methyl-cytidine
  modified_base 97: mod_base = OTHER; note = 2'-O-Methyl-uridine phosphorothioate
  modified_base 98: mod_base = OTHER; note = 2'-O-Methyl-uridine phosphorothioate
  modified_base 99: mod_base = OTHER; note = 2'-O-Methyl-uridine phosphorothioate
  modified_base 100: mod_base = OTHER; note = 2'-O-Methyl-uridine

SEQ ID NO: 3159 - RNA, 100 nt, synthetic construct; identical to SEQ ID NO: 284
  source 1..100: mol_type = other RNA
  modified_base 1: mod_base = OTHER; note = 2'-O-Methyl-uridine phosphorothioate
  modified_base 2: mod_base = OTHER; note = 2'-O-Methyl-cytidine phosphorothioate
  modified_base 3: mod_base = OTHER; note = 2'-O-Methyl-cytidine phosphorothioate
  modified_base 29: mod_base = OTHER; note = 2'-O-Methyl-guanosine
  modified_base 30: mod_base = OTHER; note = 2'-O-Methyl-cytidine
  modified_base 31: mod_base = OTHER; note = 2'-O-Methyl-uridine
  modified_base 32: mod_base = OTHER; note = 2'-O-Methyl-adenosine
  modified_base 33: mod_base = OTHER; note = 2'-O-Methyl-guanosine
  modified_base 34: mod_base = OTHER; note = 2'-O-Methyl-adenosine
  modified_base 35: mod_base = OTHER; note = 2'-O-Methyl-adenosine
  modified_base 36: mod_base = OTHER; note = 2'-O-Methyl-adenosine
  modified_base 37: mod_base = OTHER; note = 2'-O-Methyl-uridine
  modified_base 38: mod_base = OTHER; note = 2'-O-Methyl-adenosine
  modified_base 39: mod_base = OTHER; note = 2'-O-Methyl-guanosine
  modified_base 40: mod_base = OTHER; note = 2'-O-Methyl-cytidine
  modified_base 69: mod_base = OTHER; note = 2'-O-Methyl-adenosine
  modified_base 70: mod_base = OTHER; note = 2'-O-Methyl-cytidine
  modified_base 71: mod_base = OTHER; note = 2'-O-Methyl-uridine
  modified_base 72: mod_base = OTHER; note = 2'-O-Methyl-uridine
  modified_base 73: mod_base = OTHER; note = 2'-O-Methyl-guanosine
  modified_base 74: mod_base = OTHER; note = 2'-O-Methyl-adenosine
  modified_base 75: mod_base = OTHER; note = 2'-O-Methyl-adenosine
  modified_base 76: mod_base = OTHER; note = 2'-O-Methyl-adenosine
  modified_base 77: mod_base = OTHER; note = 2'-O-Methyl-adenosine
  modified_base 78: mod_base = OTHER; note = 2'-O-Methyl-adenosine
  modified_base 79: mod_base = OTHER; note = 2'-O-Methyl-guanosine
  modified_base 80: mod_base = OTHER; note = 2'-O-Methyl-uridine
  modified_base 81: mod_base = OTHER; note = 2'-O-Methyl-guanosine
  modified_base 82: mod_base = OTHER; note = 2'-O-Methyl-guanosine
  modified_base 83: mod_base = OTHER; note = 2'-O-Methyl-cytidine
  modified_base 84: mod_base = OTHER; note = 2'-O-Methyl-adenosine
  modified_base 85: mod_base = OTHER; note = 2'-O-Methyl-cytidine
  modified_base 86: mod_base = OTHER; note = 2'-O-Methyl-cytidine
  modified_base 87: mod_base = OTHER; note = 2'-O-Methyl-guanosine
  modified_base 88: mod_base = OTHER; note = 2'-O-Methyl-adenosine
  modified_base 89: mod_base = OTHER; note = 2'-O-Methyl-guanosine
  modified_base 90: mod_base = OTHER; note = 2'-O-Methyl-uridine
  modified_base 91: mod_base = OTHER; note = 2'-O-Methyl-cytidine
  modified_base 92: mod_base = OTHER; note = 2'-O-Methyl-guanosine
  modified_base 93: mod_base = OTHER; note = 2'-O-Methyl-guanosine
  modified_base 94: mod_base = OTHER; note = 2'-O-Methyl-uridine
  modified_base 95: mod_base = OTHER; note = 2'-O-Methyl-guanosine
  modified_base 96: mod_base = OTHER; note = 2'-O-Methyl-cytidine
  modified_base 97: mod_base = OTHER; note = 2'-O-Methyl-uridine phosphorothioate
  modified_base 98: mod_base = OTHER; note = 2'-O-Methyl-uridine phosphorothioate
  modified_base 99: mod_base = OTHER; note = 2'-O-Methyl-uridine phosphorothioate
  modified_base 100: mod_base = OTHER; note = 2'-O-Methyl-uridine

SEQ ID NO: 3160 - RNA, 100 nt, synthetic construct; identical to SEQ ID NO: 289
  source 1..100: mol_type = other RNA
  modified_base 1: mod_base = OTHER; note = 2'-O-Methyl-adenosine phosphorothioate
  modified_base 2: mod_base = OTHER; note = 2'-O-Methyl-uridine phosphorothioate
  modified_base 3: mod_base = OTHER; note = 2'-O-Methyl-uridine phosphorothioate
  modified_base 29: mod_base = OTHER; note = 2'-O-Methyl-guanosine
  modified_base 30: mod_base = OTHER; note = 2'-O-Methyl-cytidine
  modified_base 31: mod_base = OTHER; note = 2'-O-Methyl-uridine
  modified_base 32: mod_base = OTHER; note = 2'-O-Methyl-adenosine
  modified_base 33: mod_base = OTHER; note = 2'-O-Methyl-guanosine
  modified_base 34: mod_base = OTHER; note = 2'-O-Methyl-adenosine
  modified_base 35: mod_base = OTHER; note = 2'-O-Methyl-adenosine
  modified_base 36: mod_base = OTHER; note = 2'-O-Methyl-adenosine
  modified_base 37: mod_base = OTHER; note = 2'-O-Methyl-uridine
  modified_base 38: mod_base = OTHER; note = 2'-O-Methyl-adenosine
  modified_base 39: mod_base = OTHER; note = 2'-O-Methyl-guanosine
  modified_base 40: mod_base = OTHER; note = 2'-O-Methyl-cytidine
  modified_base 69: mod_base = OTHER; note = 2'-O-Methyl-adenosine
  modified_base 70: mod_base = OTHER; note = 2'-O-Methyl-cytidine
  modified_base 71: mod_base = OTHER; note = 2'-O-Methyl-uridine
  modified_base 72: mod_base = OTHER; note = 2'-O-Methyl-uridine
  modified_base 73: mod_base = OTHER; note = 2'-O-Methyl-guanosine
  modified_base 74: mod_base = OTHER; note = 2'-O-Methyl-adenosine
  modified_base 75: mod_base = OTHER; note = 2'-O-Methyl-adenosine
  modified_base 76: mod_base = OTHER; note = 2'-O-Methyl-adenosine
  modified_base 77: mod_base = OTHER; note = 2'-O-Methyl-adenosine
  modified_base 78: mod_base = OTHER; note = 2'-O-Methyl-adenosine
  modified_base 79: mod_base = OTHER; note = 2'-O-Methyl-guanosine
  modified_base 80: mod_base = OTHER; note = 2'-O-Methyl-uridine
  modified_base 81: mod_base = OTHER; note = 2'-O-Methyl-guanosine
  modified_base 82: mod_base = OTHER; note = 2'-O-Methyl-guanosine
  modified_base 83: mod_base = OTHER; note = 2'-O-Methyl-cytidine
  modified_base 84: mod_base = OTHER; note = 2'-O-Methyl-adenosine
  modified_base 85: mod_base = OTHER; note = 2'-O-Methyl-cytidine
  modified_base 86: mod_base = OTHER; note = 2'-O-Methyl-cytidine
  modified_base 87: mod_base = OTHER; note = 2'-O-Methyl-guanosine
  modified_base 88: mod_base = OTHER; note = 2'-O-Methyl-adenosine
  modified_base 89: mod_base = OTHER; note = 2'-O-Methyl-guanosine
  modified_base 90: mod_base = OTHER; note = 2'-O-Methyl-uridine
  modified_base 91: mod_base = OTHER; note = 2'-O-Methyl-cytidine
  modified_base 92: mod_base = OTHER; note = 2'-O-Methyl-guanosine
  modified_base 93: mod_base = OTHER; note = 2'-O-Methyl-guanosine
  modified_base 94: mod_base = OTHER; note = 2'-O-Methyl-uridine
  modified_base 95: mod_base = OTHER; note = 2'-O-Methyl-guanosine
  modified_base 96: mod_base = OTHER; note = 2'-O-Methyl-cytidine
  modified_base 97: mod_base = OTHER; note = 2'-O-Methyl-uridine phosphorothioate
  modified_base 98: mod_base = OTHER; note = 2'-O-Methyl-uridine phosphorothioate
  modified_base 99: mod_base = OTHER; note = 2'-O-Methyl-uridine phosphorothioate
  modified_base 100: mod_base = OTHER; note = 2'-O-Methyl-uridine

SEQ ID NO: 3161 - RNA, 100 nt, synthetic construct; identical to SEQ ID NO: 293
  source 1..100: mol_type = other RNA
  modified_base 1: mod_base = OTHER; note = 2'-O-Methyl-adenosine phosphorothioate
  modified_base 2: mod_base = OTHER; note = 2'-O-Methyl-cytidine phosphorothioate
  modified_base 3: mod_base = OTHER; note = 2'-O-Methyl-uridine phosphorothioate
  modified_base 29: mod_base = OTHER; note = 2'-O-Methyl-guanosine
  modified_base 30: mod_base = OTHER; note = 2'-O-Methyl-cytidine
  modified_base 31: mod_base = OTHER; note = 2'-O-Methyl-uridine
  modified_base 32: mod_base = OTHER; note = 2'-O-Methyl-adenosine
  modified_base 33: mod_base = OTHER; note = 2'-O-Methyl-guanosine
  modified_base 34: mod_base = OTHER; note = 2'-O-Methyl-adenosine
  modified_base 35: mod_base = OTHER; note = 2'-O-Methyl-adenosine
  modified_base 36: mod_base = OTHER; note = 2'-O-Methyl-adenosine
  modified_base 37: mod_base = OTHER; note = 2'-O-Methyl-uridine
  modified_base 38: mod_base = OTHER; note = 2'-O-Methyl-adenosine
  modified_base 39: mod_base = OTHER; note = 2'-O-Methyl-guanosine
  modified_base 40: mod_base = OTHER; note = 2'-O-Methyl-cytidine
  modified_base 69: mod_base = OTHER; note = 2'-O-Methyl-adenosine
  modified_base 70: mod_base = OTHER; note = 2'-O-Methyl-cytidine
  modified_base 71: mod_base = OTHER; note = 2'-O-Methyl-uridine
  modified_base 72: mod_base = OTHER; note = 2'-O-Methyl-uridine
  modified_base 73: mod_base = OTHER; note = 2'-O-Methyl-guanosine
  modified_base 74: mod_base = OTHER; note = 2'-O-Methyl-adenosine
  modified_base 75: mod_base = OTHER; note = 2'-O-Methyl-adenosine
  modified_base 76: mod_base = OTHER; note = 2'-O-Methyl-adenosine
  modified_base 77: mod_base = OTHER; note = 2'-O-Methyl-adenosine
  modified_base 78: mod_base = OTHER; note = 2'-O-Methyl-adenosine
  modified_base 79: mod_base = OTHER; note = 2'-O-Methyl-guanosine
  modified_base 80: mod_base = OTHER; note = 2'-O-Methyl-uridine
  modified_base 81: mod_base = OTHER; note = 2'-O-Methyl-guanosine
  modified_base 82: mod_base = OTHER; note = 2'-O-Methyl-guanosine
  modified_base 83: mod_base = OTHER; note = 2'-O-Methyl-cytidine
  modified_base 84: mod_base = OTHER; note = 2'-O-Methyl-adenosine
  modified_base 85: mod_base = OTHER; note = 2'-O-Methyl-cytidine
  modified_base 86: mod_base = OTHER; note = 2'-O-Methyl-cytidine
  modified_base 87: mod_base = OTHER; note = 2'-O-Methyl-guanosine
  modified_base 88: mod_base = OTHER; note = 2'-O-Methyl-adenosine
  modified_base 89: mod_base = OTHER; note = 2'-O-Methyl-guanosine
  modified_base 90: mod_base = OTHER; note = 2'-O-Methyl-uridine
  modified_base 91: mod_base = OTHER; note = 2'-O-Methyl-cytidine
  modified_base 92: mod_base = OTHER; note = 2'-O-Methyl-guanosine
  modified_base 93: mod_base = OTHER; note = 2'-O-Methyl-guanosine
  modified_base 94: mod_base = OTHER; note = 2'-O-Methyl-uridine
  modified_base 95: mod_base = OTHER; note = 2'-O-Methyl-guanosine
  modified_base 96: mod_base = OTHER; note = 2'-O-Methyl-cytidine
  modified_base 97: mod_base = OTHER; note = 2'-O-Methyl-uridine phosphorothioate
  modified_base 98: mod_base = OTHER; note = 2'-O-Methyl-uridine phosphorothioate
  modified_base 99: mod_base = OTHER; note = 2'-O-Methyl-uridine phosphorothioate
  modified_base 100: mod_base = OTHER; note = 2'-O-Methyl-uridine

SEQ ID NO: 3162 - RNA, 100 nt, synthetic construct; identical to SEQ ID NO: 298
  source 1..100: mol_type = other RNA
  modified_base 1: mod_base = OTHER; note = 2'-O-Methyl-cytidine phosphorothioate
  modified_base 2: mod_base = OTHER; note = 2'-O-Methyl-uridine phosphorothioate
  modified_base 3: mod_base = OTHER; note = 2'-O-Methyl-uridine phosphorothioate
  modified_base 29: mod_base = OTHER; note = 2'-O-Methyl-guanosine
  modified_base 30: mod_base = OTHER; note = 2'-O-Methyl-cytidine
  modified_base 31: mod_base = OTHER; note = 2'-O-Methyl-uridine
  modified_base 32: mod_base = OTHER; note = 2'-O-Methyl-adenosine
  modified_base 33: mod_base = OTHER; note = 2'-O-Methyl-guanosine
  modified_base 34: mod_base = OTHER; note = 2'-O-Methyl-adenosine
  modified_base 35: mod_base = OTHER; note = 2'-O-Methyl-adenosine
  modified_base 36: mod_base = OTHER; note = 2'-O-Methyl-adenosine
  modified_base 37: mod_base = OTHER; note = 2'-O-Methyl-uridine
  modified_base 38: mod_base = OTHER; note = 2'-O-Methyl-adenosine
  modified_base 39: mod_base = OTHER; note = 2'-O-Methyl-guanosine
  modified_base 40: mod_base = OTHER; note = 2'-O-Methyl-cytidine
  modified_base 69: mod_base = OTHER; note = 2'-O-Methyl-adenosine
  modified_base 70: mod_base = OTHER; note = 2'-O-Methyl-cytidine
  modified_base 71: mod_base = OTHER; note = 2'-O-Methyl-uridine
  modified_base 72: mod_base = OTHER; note = 2'-O-Methyl-uridine
  modified_base 73: mod_base = OTHER; note = 2'-O-Methyl-guanosine
  modified_base 74: mod_base = OTHER; note = 2'-O-Methyl-adenosine
  modified_base 75: mod_base = OTHER; note = 2'-O-Methyl-adenosine
  modified_base 76: mod_base = OTHER; note = 2'-O-Methyl-adenosine
  modified_base 77: mod_base = OTHER; note = 2'-O-Methyl-adenosine
  modified_base 78: mod_base = OTHER; note = 2'-O-Methyl-adenosine
  modified_base 79: mod_base = OTHER; note = 2'-O-Methyl-guanosine
  modified_base 80: mod_base = OTHER; note = 2'-O-Methyl-uridine
  modified_base 81: mod_base = OTHER; note = 2'-O-Methyl-guanosine
  modified_base 82: mod_base = OTHER; note = 2'-O-Methyl-guanosine
  modified_base 83: mod_base = OTHER; note = 2'-O-Methyl-cytidine
  modified_base 84: mod_base = OTHER; note = 2'-O-Methyl-adenosine
  modified_base 85: mod_base = OTHER; note = 2'-O-Methyl-cytidine
  modified_base 86: mod_base = OTHER; note = 2'-O-Methyl-cytidine
  modified_base 87: mod_base = OTHER; note = 2'-O-Methyl-guanosine
  modified_base 88: mod_base = OTHER; note = 2'-O-Methyl-adenosine
  modified_base 89: mod_base = OTHER; note = 2'-O-Methyl-guanosine
  modified_base 90: mod_base = OTHER; note = 2'-O-Methyl-uridine
  modified_base 91: mod_base = OTHER; note = 2'-O-Methyl-cytidine
  modified_base 92: mod_base = OTHER; note = 2'-O-Methyl-guanosine
  modified_base 93: mod_base = OTHER; note = 2'-O-Methyl-guanosine
  modified_base 94: mod_base = OTHER; note = 2'-O-Methyl-uridine
  modified_base 95: mod_base = OTHER; note = 2'-O-Methyl-guanosine
  modified_base 96: mod_base = OTHER; note = 2'-O-Methyl-cytidine
  modified_base 97: mod_base = OTHER; note = 2'-O-Methyl-uridine phosphorothioate
  modified_base 98: mod_base = OTHER; note = 2'-O-Methyl-uridine phosphorothioate
  modified_base 99: mod_base = OTHER; note = 2'-O-Methyl-uridine phosphorothioate
  modified_base 100: mod_base = OTHER; note = 2'-O-Methyl-uridine

SEQ ID NO: 3163 - RNA, 100 nt, synthetic construct; identical to SEQ ID NO: 302
  source 1..100: mol_type = other RNA
  modified_base 1: mod_base = OTHER; note = 2'-O-Methyl-guanosine phosphorothioate
  modified_base 2: mod_base = OTHER; note = 2'-O-Methyl-guanosine phosphorothioate
  modified_base 3: mod_base = OTHER; note = 2'-O-Methyl-adenosine phosphorothioate
  modified_base 29: mod_base = OTHER; note = 2'-O-Methyl-guanosine
  modified_base 30: mod_base = OTHER; note = 2'-O-Methyl-cytidine
  modified_base 31: mod_base = OTHER; note = 2'-O-Methyl-uridine
  modified_base 32: mod_base = OTHER; note = 2'-O-Methyl-adenosine
  modified_base 33: mod_base = OTHER; note = 2'-O-Methyl-guanosine
  modified_base 34: mod_base = OTHER; note = 2'-O-Methyl-adenosine
  modified_base 35: mod_base = OTHER; note = 2'-O-Methyl-adenosine
  modified_base 36: mod_base = OTHER; note = 2'-O-Methyl-adenosine
  modified_base 37: mod_base = OTHER; note = 2'-O-Methyl-uridine
  modified_base 38: mod_base = OTHER; note = 2'-O-Methyl-adenosine
  modified_base 39: mod_base = OTHER; note = 2'-O-Methyl-guanosine
  modified_base 40: mod_base = OTHER; note = 2'-O-Methyl-cytidine
  modified_base 69: mod_base = OTHER; note = 2'-O-Methyl-adenosine
  modified_base 70: mod_base = OTHER; note = 2'-O-Methyl-cytidine
  modified_base 71: mod_base = OTHER; note = 2'-O-Methyl-uridine
  modified_base 72: mod_base = OTHER; note = 2'-O-Methyl-uridine
  modified_base 73: mod_base = OTHER; note = 2'-O-Methyl-guanosine
  modified_base 74: mod_base = OTHER; note = 2'-O-Methyl-adenosine
  modified_base 75: mod_base = OTHER; note = 2'-O-Methyl-adenosine
  modified_base 76: mod_base = OTHER; note = 2'-O-Methyl-adenosine
  modified_base 77: mod_base = OTHER; note = 2'-O-Methyl-adenosine
  modified_base 78: mod_base = OTHER; note = 2'-O-Methyl-adenosine
  modified_base 79: mod_base = OTHER; note = 2'-O-Methyl-guanosine
  modified_base 80: mod_base = OTHER; note = 2'-O-Methyl-uridine
  modified_base 81: mod_base = OTHER; note = 2'-O-Methyl-guanosine
  modified_base 82: mod_base = OTHER; note = 2'-O-Methyl-guanosine
  modified_base 83: mod_base = OTHER; note = 2'-O-Methyl-cytidine
  modified_base 84: mod_base = OTHER; note = 2'-O-Methyl-adenosine
  modified_base 85: mod_base = OTHER; note = 2'-O-Methyl-cytidine
  modified_base 86: mod_base = OTHER; note = 2'-O-Methyl-cytidine
  modified_base 87: mod_base = OTHER; note = 2'-O-Methyl-guanosine
  modified_base 88: mod_base = OTHER; note = 2'-O-Methyl-adenosine
  modified_base 89: mod_base = OTHER; note = 2'-O-Methyl-guanosine
  modified_base 90: mod_base = OTHER; note = 2'-O-Methyl-uridine
  modified_base 91: mod_base = OTHER; note = 2'-O-Methyl-cytidine
  modified_base 92: mod_base = OTHER; note = 2'-O-Methyl-guanosine
  modified_base 93: mod_base = OTHER; note = 2'-O-Methyl-guanosine
  modified_base 94: mod_base = OTHER; note = 2'-O-Methyl-uridine
  modified_base 95: mod_base = OTHER; note = 2'-O-Methyl-guanosine
  modified_base 96: mod_base = OTHER; note = 2'-O-Methyl-cytidine
  modified_base 97: mod_base = OTHER; note = 2'-O-Methyl-uridine phosphorothioate
  modified_base 98: mod_base = OTHER; note = 2'-O-Methyl-uridine phosphorothioate
  modified_base 99: mod_base = OTHER; note = 2'-O-Methyl-uridine phosphorothioate
  modified_base 100: mod_base = OTHER; note = 2'-O-Methyl-uridine

SEQ ID NO: 3164 - RNA, 100 nt, synthetic construct; identical to SEQ ID NO: 305
  source 1..100: mol_type = other RNA
  modified_base 1: mod_base = OTHER; note = 2'-O-Methyl-adenosine phosphorothioate
  modified_base 2: mod_base = OTHER; note = 2'-O-Methyl-guanosine phosphorothioate
  modified_base 3: mod_base = OTHER; note = 2'-O-Methyl-uridine phosphorothioate
  modified_base 29: mod_base = OTHER; note = 2'-O-Methyl-guanosine
  modified_base 30: mod_base = OTHER; note = 2'-O-Methyl-cytidine
  modified_base 31: mod_base = OTHER; note = 2'-O-Methyl-uridine
  modified_base 32: mod_base = OTHER; note = 2'-O-Methyl-adenosine
  modified_base 33: mod_base = OTHER; note = 2'-O-Methyl-guanosine
  modified_base 34: mod_base = OTHER; note = 2'-O-Methyl-adenosine
  modified_base 35: mod_base = OTHER; note = 2'-O-Methyl-adenosine
  modified_base 36: mod_base = OTHER; note = 2'-O-Methyl-adenosine
  modified_base 37: mod_base = OTHER; note = 2'-O-Methyl-uridine
  modified_base 38: mod_base = OTHER; note = 2'-O-Methyl-adenosine
  modified_base 39: mod_base = OTHER; note = 2'-O-Methyl-guanosine
  modified_base 40: mod_base = OTHER; note = 2'-O-Methyl-cytidine
  modified_base 69: mod_base = OTHER; note = 2'-O-Methyl-adenosine
  modified_base 70: mod_base = OTHER; note = 2'-O-Methyl-cytidine
  modified_base 71: mod_base = OTHER; note = 2'-O-Methyl-uridine
  modified_base 72: mod_base = OTHER; note = 2'-O-Methyl-uridine
  modified_base 73: mod_base = OTHER; note = 2'-O-Methyl-guanosine
  modified_base 74: mod_base = OTHER; note = 2'-O-Methyl-adenosine
  modified_base 75: mod_base = OTHER; note = 2'-O-Methyl-adenosine
  modified_base 76: mod_base = OTHER; note = 2'-O-Methyl-adenosine
  modified_base 77: mod_base = OTHER; note = 2'-O-Methyl-adenosine
  modified_base 78: mod_base = OTHER; note = 2'-O-Methyl-adenosine
  modified_base 79: mod_base = OTHER; note = 2'-O-Methyl-guanosine
  modified_base 80: mod_base = OTHER; note = 2'-O-Methyl-uridine
  modified_base 81: mod_base = OTHER; note = 2'-O-Methyl-guanosine
  modified_base 82: mod_base = OTHER; note = 2'-O-Methyl-guanosine
  modified_base 83: mod_base = OTHER; note = 2'-O-Methyl-cytidine
  modified_base 84: mod_base = OTHER; note = 2'-O-Methyl-adenosine
  modified_base 85: mod_base = OTHER; note = 2'-O-Methyl-cytidine
  modified_base 86: mod_base = OTHER; note = 2'-O-Methyl-cytidine
  modified_base 87: mod_base = OTHER; note = 2'-O-Methyl-guanosine
  modified_base 88: mod_base = OTHER; note = 2'-O-Methyl-adenosine
  modified_base 89: mod_base = OTHER; note = 2'-O-Methyl-guanosine
  modified_base 90: mod_base = OTHER; note = 2'-O-Methyl-uridine
  modified_base 91: mod_base = OTHER; note = 2'-O-Methyl-cytidine
  modified_base 92: mod_base = OTHER; note = 2'-O-Methyl-guanosine
  modified_base 93: mod_base = OTHER; note = 2'-O-Methyl-guanosine
  modified_base 94: mod_base = OTHER; note = 2'-O-Methyl-uridine
  modified_base 95: mod_base = OTHER; note = 2'-O-Methyl-guanosine
  modified_base 96: mod_base = OTHER; note = 2'-O-Methyl-cytidine
  modified_base 97: mod_base = OTHER; note = 2'-O-Methyl-uridine phosphorothioate
  modified_base 98: mod_base = OTHER; note = 2'-O-Methyl-uridine phosphorothioate
  modified_base 99: mod_base = OTHER; note = 2'-O-Methyl-uridine phosphorothioate
  modified_base 100: mod_base = OTHER; note = 2'-O-Methyl-uridine

SEQ ID NO: 3165 - RNA, 100 nt, synthetic construct; identical to SEQ ID NO: 308
  source 1..100: mol_type = other RNA
  modified_base 1: mod_base = OTHER; note = 2'-O-Methyl-guanosine phosphorothioate
  modified_base 2: mod_base = OTHER; note = 2'-O-Methyl-guanosine phosphorothioate
  modified_base 3: mod_base = OTHER; note = 2'-O-Methyl-adenosine phosphorothioate
  modified_base 29: mod_base = OTHER; note = 2'-O-Methyl-guanosine
  modified_base 30: mod_base = OTHER; note = 2'-O-Methyl-cytidine
  modified_base 31: mod_base = OTHER; note = 2'-O-Methyl-uridine
  modified_base 32: mod_base = OTHER; note = 2'-O-Methyl-adenosine
  modified_base 33: mod_base = OTHER; note = 2'-O-Methyl-guanosine
  modified_base 34: mod_base = OTHER; note = 2'-O-Methyl-adenosine
  modified_base 35: mod_base = OTHER; note = 2'-O-Methyl-adenosine
  modified_base 36: mod_base = OTHER; note = 2'-O-Methyl-adenosine
  modified_base 37: mod_base = OTHER; note = 2'-O-Methyl-uridine
  modified_base 38: mod_base = OTHER; note = 2'-O-Methyl-adenosine
  modified_base 39: mod_base = OTHER; note = 2'-O-Methyl-guanosine
  modified_base 40: mod_base = OTHER; note = 2'-O-Methyl-cytidine
  modified_base 69: mod_base = OTHER; note = 2'-O-Methyl-adenosine
  modified_base 70: mod_base = OTHER; note = 2'-O-Methyl-cytidine
  modified_base 71: mod_base = OTHER; note = 2'-O-Methyl-uridine
  modified_base 72: mod_base = OTHER; note = 2'-O-Methyl-uridine
  modified_base 73: mod_base = OTHER; note = 2'-O-Methyl-guanosine
  modified_base 74: mod_base = OTHER; note = 2'-O-Methyl-adenosine
  modified_base 75: mod_base = OTHER; note = 2'-O-Methyl-adenosine
  modified_base 76: mod_base = OTHER; note = 2'-O-Methyl-adenosine
  modified_base 77: mod_base = OTHER; note = 2'-O-Methyl-adenosine
  modified_base 78: mod_base = OTHER; note = 2'-O-Methyl-adenosine
  modified_base 79: mod_base = OTHER; note = 2'-O-Methyl-guanosine
  modified_base 80: mod_base = OTHER; note = 2'-O-Methyl-uridine
  modified_base 81: mod_base = OTHER; note = 2'-O-Methyl-guanosine
  modified_base 82: mod_base = OTHER; note = 2'-O-Methyl-guanosine
  modified_base 83: mod_base = OTHER; note = 2'-O-Methyl-cytidine
  modified_base 84: mod_base = OTHER; note = 2'-O-Methyl-adenosine
  modified_base 85: mod_base = OTHER; note = 2'-O-Methyl-cytidine
  modified_base 86: mod_base = OTHER; note = 2'-O-Methyl-cytidine
  modified_base 87: mod_base = OTHER; note = 2'-O-Methyl-guanosine
  modified_base 88: mod_base = OTHER; note = 2'-O-Methyl-adenosine
  modified_base 89: mod_base = OTHER; note = 2'-O-Methyl-guanosine
  modified_base 90: mod_base = OTHER; note = 2'-O-Methyl-uridine
  modified_base 91: mod_base = OTHER; note = 2'-O-Methyl-cytidine
  modified_base 92: mod_base = OTHER; note = 2'-O-Methyl-guanosine
  modified_base 93: mod_base = OTHER; note = 2'-O-Methyl-guanosine
  modified_base 94: mod_base = OTHER; note = 2'-O-Methyl-uridine
  modified_base 95: mod_base = OTHER; note = 2'-O-Methyl-guanosine
  modified_base 96: mod_base = OTHER; note = 2'-O-Methyl-cytidine
  modified_base 97: mod_base = OTHER; note = 2'-O-Methyl-uridine phosphorothioate
  modified_base 98: mod_base = OTHER; note = 2'-O-Methyl-uridine phosphorothioate
  modified_base 99: mod_base = OTHER; note = 2'-O-Methyl-uridine phosphorothioate
  modified_base 100: mod_base = OTHER; note = 2'-O-Methyl-uridine

SEQ ID NO: 3166 - RNA, 100 nt, synthetic construct; identical to SEQ ID NO: 321
  source 1..100: mol_type = other RNA
  modified_base 1: mod_base = OTHER; note = 2'-O-Methyl-cytidine phosphorothioate
  modified_base 2: mod_base = OTHER; note = 2'-O-Methyl-adenosine phosphorothioate
  modified_base 3: mod_base = OTHER; note = 2'-O-Methyl-uridine phosphorothioate
  modified_base 29: mod_base = OTHER; note = 2'-O-Methyl-guanosine
  modified_base 30: mod_base = OTHER; note = 2'-O-Methyl-cytidine
  modified_base 31: mod_base = OTHER; note = 2'-O-Methyl-uridine
  modified_base 32: mod_base = OTHER; note = 2'-O-Methyl-adenosine
  modified_base 33: mod_base = OTHER; note = 2'-O-Methyl-guanosine
  modified_base 34: mod_base = OTHER; note = 2'-O-Methyl-adenosine
  modified_base 35: mod_base = OTHER; note = 2'-O-Methyl-adenosine
  modified_base 36: mod_base = OTHER; note = 2'-O-Methyl-adenosine
  modified_base 37: mod_base = OTHER; note = 2'-O-Methyl-uridine
  modified_base 38: mod_base = OTHER; note = 2'-O-Methyl-adenosine
  modified_base 39: mod_base = OTHER; note = 2'-O-Methyl-guanosine
  modified_base 40: mod_base = OTHER; note = 2'-O-Methyl-cytidine
  modified_base 69: mod_base = OTHER; note = 2'-O-Methyl-adenosine
  modified_base 70: mod_base = OTHER; note = 2'-O-Methyl-cytidine
  modified_base 71: mod_base = OTHER; note = 2'-O-Methyl-uridine
  modified_base 72: mod_base = OTHER; note = 2'-O-Methyl-uridine
  modified_base 73: mod_base = OTHER; note = 2'-O-Methyl-guanosine
  modified_base 74: mod_base = OTHER; note = 2'-O-Methyl-adenosine
  modified_base 75: mod_base = OTHER; note = 2'-O-Methyl-adenosine
  modified_base 76: mod_base = OTHER; note = 2'-O-Methyl-adenosine
  modified_base 77: mod_base = OTHER; note = 2'-O-Methyl-adenosine
  modified_base 78: mod_base = OTHER; note = 2'-O-Methyl-adenosine
  modified_base 79: mod_base = OTHER; note = 2'-O-Methyl-guanosine
  modified_base 80: mod_base = OTHER; note = 2'-O-Methyl-uridine
  modified_base 81: mod_base = OTHER; note = 2'-O-Methyl-guanosine
  modified_base 82: mod_base = OTHER; note = 2'-O-Methyl-guanosine
  modified_base 83: mod_base = OTHER; note = 2'-O-Methyl-cytidine
  modified_base 84: mod_base = OTHER; note = 2'-O-Methyl-adenosine
  modified_base 85: mod_base = OTHER; note = 2'-O-Methyl-cytidine
  modified_base 86: mod_base = OTHER; note = 2'-O-Methyl-cytidine
  modified_base 87: mod_base = OTHER; note = 2'-O-Methyl-guanosine
  modified_base 88: mod_base = OTHER; note = 2'-O-Methyl-adenosine
  modified_base 89: mod_base = OTHER; note = 2'-O-Methyl-guanosine
  modified_base 90: mod_base = OTHER; note = 2'-O-Methyl-uridine
  modified_base 91: mod_base = OTHER; note = 2'-O-Methyl-cytidine
  modified_base 92: mod_base = OTHER; note = 2'-O-Methyl-guanosine
  modified_base 93: mod_base = OTHER; note = 2'-O-Methyl-guanosine
  modified_base 94: mod_base = OTHER; note = 2'-O-Methyl-uridine
  modified_base 95: mod_base = OTHER; note = 2'-O-Methyl-guanosine
  modified_base 96: mod_base = OTHER; note = 2'-O-Methyl-cytidine
  modified_base 97: mod_base = OTHER; note = 2'-O-Methyl-uridine phosphorothioate
  modified_base 98: mod_base = OTHER; note = 2'-O-Methyl-uridine phosphorothioate
  modified_base 99: mod_base = OTHER; note = 2'-O-Methyl-uridine phosphorothioate
  modified_base 100: mod_base = OTHER; note = 2'-O-Methyl-uridine

SEQ ID NO: 3167 - RNA, 100 nt, synthetic construct; identical to SEQ ID NO: 324
  source 1..100: mol_type = other RNA
  modified_base 1: mod_base = OTHER; note = 2'-O-Methyl-adenosine phosphorothioate
  modified_base 2: mod_base = OTHER; note = 2'-O-Methyl-cytidine phosphorothioate
  modified_base 3: mod_base = OTHER; note = 2'-O-Methyl-adenosine phosphorothioate
  modified_base 29: mod_base = OTHER; note = 2'-O-Methyl-guanosine
  modified_base 30: mod_base = OTHER; note = 2'-O-Methyl-cytidine
  modified_base 31: mod_base = OTHER; note = 2'-O-Methyl-uridine
  modified_base 32: mod_base = OTHER; note = 2'-O-Methyl-adenosine
  modified_base 33: mod_base = OTHER; note = 2'-O-Methyl-guanosine
  modified_base 34: mod_base = OTHER; note = 2'-O-Methyl-adenosine
  modified_base 35: mod_base = OTHER; note = 2'-O-Methyl-adenosine
  modified_base 36: mod_base = OTHER; note = 2'-O-Methyl-adenosine
  modified_base 37: mod_base = OTHER; note = 2'-O-Methyl-uridine
  modified_base 38: mod_base = OTHER; note = 2'-O-Methyl-adenosine
  modified_base 39: mod_base = OTHER; note = 2'-O-Methyl-guanosine
  modified_base 40: mod_base = OTHER; note = 2'-O-Methyl-cytidine
  modified_base 69: mod_base = OTHER; note = 2'-O-Methyl-adenosine
  modified_base 70: mod_base = OTHER; note = 2'-O-Methyl-cytidine
  modified_base 71: mod_base = OTHER; note = 2'-O-Methyl-uridine
  modified_base 72: mod_base = OTHER; note = 2'-O-Methyl-uridine
  modified_base 73: mod_base = OTHER; note = 2'-O-Methyl-guanosine
  modified_base 74: mod_base = OTHER; note = 2'-O-Methyl-adenosine
  modified_base 75: mod_base = OTHER; note = 2'-O-Methyl-adenosine
  modified_base 76: mod_base = OTHER; note = 2'-O-Methyl-adenosine
  modified_base 77: mod_base = OTHER; note = 2'-O-Methyl-adenosine
  modified_base 78: mod_base = OTHER; note = 2'-O-Methyl-adenosine
  modified_base 79: mod_base = OTHER; note = 2'-O-Methyl-guanosine
  modified_base 80: mod_base = OTHER; note = 2'-O-Methyl-uridine
  modified_base 81: mod_base = OTHER; note = 2'-O-Methyl-guanosine
  modified_base 82: mod_base = OTHER; note = 2'-O-Methyl-guanosine
  modified_base 83: mod_base = OTHER; note = 2'-O-Methyl-cytidine
  modified_base 84: mod_base = OTHER; note = 2'-O-Methyl-adenosine
  modified_base 85: mod_base = OTHER; note = 2'-O-Methyl-cytidine
  modified_base 86: mod_base = OTHER; note = 2'-O-Methyl-cytidine
  modified_base 87: mod_base = OTHER; note = 2'-O-Methyl-guanosine
  modified_base 88: mod_base = OTHER; note = 2'-O-Methyl-adenosine
  modified_base 89: mod_base = OTHER; note = 2'-O-Methyl-guanosine
  modified_base 90: mod_base = OTHER; note = 2'-O-Methyl-uridine
  modified_base 91: mod_base = OTHER; note = 2'-O-Methyl-cytidine
  modified_base 92: mod_base = OTHER; note = 2'-O-Methyl-guanosine
  modified_base 93: mod_base = OTHER; note = 2'-O-Methyl-guanosine
  modified_base 94: mod_base = OTHER; note = 2'-O-Methyl-uridine
  modified_base 95: mod_base = OTHER; note = 2'-O-Methyl-guanosine
  modified_base 96: mod_base = OTHER; note = 2'-O-Methyl-cytidine
  modified_base 97: mod_base = OTHER; note = 2'-O-Methyl-uridine phosphorothioate
  modified_base 98: mod_base = OTHER; note = 2'-O-Methyl-uridine phosphorothioate
  modified_base 99: mod_base = OTHER; note = 2'-O-Methyl-uridine phosphorothioate
  modified_base 100: mod_base = OTHER; note = 2'-O-Methyl-uridine

SEQ ID NO: 3168 - RNA, 100 nt, synthetic construct; identical to SEQ ID NO: 327
  source 1..100: mol_type = other RNA
  modified_base 1: mod_base = OTHER; note = 2'-O-Methyl-guanosine phosphorothioate
  modified_base 2: mod_base = OTHER; note = 2'-O-Methyl-adenosine phosphorothioate
  modified_base 3: mod_base = OTHER; note = 2'-O-Methyl-guanosine phosphorothioate
  modified_base 29: mod_base = OTHER; note = 2'-O-Methyl-guanosine
  modified_base 30: mod_base = OTHER; note = 2'-O-Methyl-cytidine
  modified_base 31: mod_base = OTHER; note = 2'-O-Methyl-uridine
  modified_base 32: mod_base = OTHER; note = 2'-O-Methyl-adenosine
  modified_base 33: mod_base = OTHER; note = 2'-O-Methyl-guanosine
  modified_base 34: mod_base = OTHER; note = 2'-O-Methyl-adenosine
  modified_base 35: mod_base = OTHER; note = 2'-O-Methyl-adenosine
  modified_base 36: mod_base = OTHER; note = 2'-O-Methyl-adenosine
  modified_base 37: mod_base = OTHER; note = 2'-O-Methyl-uridine
  modified_base 38: mod_base = OTHER; note = 2'-O-Methyl-adenosine
  modified_base 39: mod_base = OTHER; note = 2'-O-Methyl-guanosine
  modified_base 40: mod_base = OTHER; note = 2'-O-Methyl-cytidine
  modified_base 69: mod_base = OTHER; note = 2'-O-Methyl-adenosine
  modified_base 70: mod_base = OTHER; note = 2'-O-Methyl-cytidine
  modified_base 71: mod_base = OTHER; note = 2'-O-Methyl-uridine
  modified_base 72: mod_base = OTHER; note = 2'-O-Methyl-uridine
  modified_base 73: mod_base = OTHER; note = 2'-O-Methyl-guanosine
  modified_base 74: mod_base = OTHER; note = 2'-O-Methyl-adenosine
  modified_base 75: mod_base = OTHER; note = 2'-O-Methyl-adenosine
  modified_base 76: mod_base = OTHER; note = 2'-O-Methyl-adenosine
  modified_base 77: mod_base = OTHER; note = 2'-O-Methyl-adenosine
  modified_base 78: mod_base = OTHER; note = 2'-O-Methyl-adenosine
  modified_base 79: mod_base = OTHER; note = 2'-O-Methyl-guanosine
  modified_base 80: mod_base = OTHER; note = 2'-O-Methyl-uridine
  modified_base 81: mod_base = OTHER; note = 2'-O-Methyl-guanosine
  modified_base 82: mod_base = OTHER; note = 2'-O-Methyl-guanosine
  modified_base 83: mod_base = OTHER; note = 2'-O-Methyl-cytidine
  modified_base 84: mod_base = OTHER; note = 2'-O-Methyl-adenosine
  modified_base 85: mod_base = OTHER; note = 2'-O-Methyl-cytidine
  modified_base 86: mod_base = OTHER; note = 2'-O-Methyl-cytidine
  modified_base 87: mod_base = OTHER; note = 2'-O-Methyl-guanosine
  modified_base 88: mod_base = OTHER; note = 2'-O-Methyl-adenosine
  modified_base 89: mod_base = OTHER; note = 2'-O-Methyl-guanosine
  modified_base 90: mod_base = OTHER; note = 2'-O-Methyl-uridine
  modified_base 91: mod_base = OTHER; note = 2'-O-Methyl-cytidine
  modified_base 92: mod_base = OTHER; note = 2'-O-Methyl-guanosine
  modified_base 93: mod_base = OTHER; note = 2'-O-Methyl-guanosine
  modified_base 94: mod_base = OTHER; note = 2'-O-Methyl-uridine
  modified_base 95: mod_base = OTHER; note = 2'-O-Methyl-guanosine
  modified_base 96: mod_base = OTHER; note = 2'-O-Methyl-cytidine
  modified_base 97: mod_base = OTHER; note = 2'-O-Methyl-uridine phosphorothioate
  modified_base 98: mod_base = OTHER; note = 2'-O-Methyl-uridine phosphorothioate
  modified_base 99: mod_base = OTHER; note = 2'-O-Methyl-uridine phosphorothioate
  modified_base 100: mod_base = OTHER; note = 2'-O-Methyl-uridine

SEQ ID NO: 3169 - RNA, 100 nt, synthetic construct; identical to SEQ ID NO: 393
  source 1..100: mol_type = other RNA
  modified_base 1: mod_base = OTHER; note = 2'-O-Methyl-uridine phosphorothioate
  modified_base 2: mod_base = OTHER; note = 2'-O-Methyl-cytidine phosphorothioate
  modified_base 3: mod_base = OTHER; note = 2'-O-Methyl-adenosine phosphorothioate
  modified_base 21: mod_base = OTHER; note = 2'-O-Methyl-guanosine
  modified_base 28: mod_base = OTHER; note = 2'-O-Methyl-adenosine
  modified_base 29: mod_base = OTHER; note = 2'-O-Methyl-guanosine
  modified_base 30: mod_base = OTHER; note = 2'-O-Methyl-cytidine
  modified_base 31: mod_base = OTHER; note = 2'-O-Methyl-uridine
  modified_base 32: mod_base = OTHER; note = 2'-O-Methyl-adenosine
  modified_base 33: mod_base = OTHER; note = 2'-O-Methyl-guanosine
  modified_base 34: mod_base = OTHER; note = 2'-O-Methyl-adenosine
  modified_base 35: mod_base = OTHER; note = 2'-O-Methyl-adenosine
  modified_base 36: mod_base = OTHER; note = 2'-O-Methyl-adenosine
  modified_base 37: mod_base = OTHER; note = 2'-O-Methyl-uridine
  modified_base 38: mod_base = OTHER; note = 2'-O-Methyl-adenosine
  modified_base 39: mod_base = OTHER; note = 2'-O-Methyl-guanosine
  modified_base 40: mod_base = OTHER; note = 2'-O-Methyl-cytidine
  modified_base 41: mod_base = OTHER; note = 2'-O-Methyl-adenosine
  modified_base 42: mod_base = OTHER; note = 2'-O-Methyl-adenosine
  modified_base 46: mod_base = OTHER; note = 2'-O-Methyl-adenosine
  modified_base 48: mod_base = OTHER; note = 2'-O-Methyl-adenosine
  modified_base 50: mod_base = OTHER; note = 2'-O-Methyl-uridine
  modified_base 52: mod_base = OTHER; note = 2'-O-Methyl-adenosine
  modified_base 53: mod_base = OTHER; note = 2'-O-Methyl-guanosine
  modified_base 54: mod_base = OTHER; note = 2'-O-Methyl-guanosine
  modified_base 55: mod_base = OTHER; note = 2'-O-Methyl-cytidine
  modified_base 56: mod_base = OTHER; note = 2'-O-Methyl-uridine
  modified_base 57: mod_base = OTHER; note = 2'-O-Methyl-adenosine
  modified_base 60: mod_base = OTHER; note = 2'-O-Methyl-cytidine
  modified_base 61: mod_base = OTHER; note = 2'-O-Methyl-cytidine
  modified_base 66: mod_base = OTHER; note = 2'-O-Methyl-uridine
  modified_base 67: mod_base = OTHER; note = 2'-O-Methyl-cytidine
  modified_base 70: mod_base = OTHER; note = 2'-O-Methyl-cytidine
  modified_base 71: mod_base = OTHER; note = 2'-O-Methyl-uridine
  modified_base 72: mod_base = OTHER; note = 2'-O-Methyl-uridine
  modified_base 73: mod_base = OTHER; note = 2'-O-Methyl-guanosine
  modified_base 74: mod_base = OTHER; note = 2'-O-Methyl-adenosine
  modified_base 75: mod_base = OTHER; note = 2'-O-Methyl-adenosine
  modified_base 76: mod_base = OTHER; note = 2'-O-Methyl-adenosine
  modified_base 77: mod_base = OTHER; note = 2'-O-Methyl-adenosine
  modified_base 78: mod_base = OTHER; note = 2'-O-Methyl-adenosine
  modified_base 79: mod_base = OTHER; note = 2'-O-Methyl-guanosine
  modified_base 80: mod_base = OTHER; note = 2'-O-Methyl-uridine
  modified_base 81: mod_base = OTHER; note = 2'-O-Methyl-guanosine
  modified_base 83: mod_base = OTHER; note = 2'-O-Methyl-cytidine
  modified_base 84: mod_base = OTHER; note = 2'-O-Methyl-adenosine
  modified_base 85: mod_base = OTHER; note = 2'-O-Methyl-cytidine
  modified_base 86: mod_base = OTHER; note = 2'-O-Methyl-cytidine
  modified_base 87: mod_base = OTHER; note = 2'-O-Methyl-guanosine
  modified_base 88: mod_base = OTHER; note = 2'-O-Methyl-adenosine
  modified_base 89: mod_base = OTHER; note = 2'-O-Methyl-guanosine
  modified_base 90: mod_base = OTHER; note = 2'-O-Methyl-uridine
  modified_base 91: mod_base = OTHER; note = 2'-O-Methyl-cytidine
  modified_base 92: mod_base = OTHER; note = 2'-O-Methyl-guanosine
  modified_base 93: mod_base = OTHER; note = 2'-O-Methyl-guanosine
  modified_base 94: mod_base = OTHER; note = 2'-O-Methyl-uridine
  modified_base 95: mod_base = OTHER; note = 2'-O-Methyl-guanosine
  modified_base 96: mod_base = OTHER; note = 2'-O-Methyl-cytidine
  modified_base 97: mod_base = OTHER; note = 2'-O-Methyl-uridine phosphorothioate
  modified_base 98: mod_base = OTHER; note = 2'-O-Methyl-uridine phosphorothioate
  modified_base 99: mod_base = OTHER; note = 2'-O-Methyl-uridine phosphorothioate
  modified_base 100: mod_base = OTHER; note = 2'-O-Methyl-uridine

SEQ ID NO: 3170 - RNA, 100 nt, synthetic construct; identical to SEQ ID NO: 395
  source 1..100: mol_type = other RNA
  modified_base 1: mod_base = OTHER; note = 2'-O-Methyl-guanosine phosphorothioate
  modified_base 2: mod_base = OTHER; note = 2'-O-Methyl-cytidine phosphorothioate
  modified_base 3: mod_base = OTHER; note = 2'-O-Methyl-uridine phosphorothioate
  modified_base 21: mod_base = OTHER; note = 2'-O-Methyl-guanosine
  modified_base 28: mod_base = OTHER; note = 2'-O-Methyl-adenosine
  modified_base 29: mod_base = OTHER; note = 2'-O-Methyl-guanosine
  modified_base 30: mod_base = OTHER; note = 2'-O-Methyl-cytidine
  modified_base 31: mod_base = OTHER; note = 2'-O-Methyl-uridine
  modified_base 32: mod_base = OTHER; note = 2'-O-Methyl-adenosine
  modified_base 33: mod_base = OTHER; note = 2'-O-Methyl-guanosine
  modified_base 34: mod_base = OTHER; note = 2'-O-Methyl-adenosine
  modified_base 35: mod_base = OTHER; note = 2'-O-Methyl-adenosine
  modified_base 36: mod_base = OTHER; note = 2'-O-Methyl-adenosine
  modified_base 37: mod_base = OTHER; note = 2'-O-Methyl-uridine
  modified_base 38: mod_base = OTHER; note = 2'-O-Methyl-adenosine
  modified_base 39: mod_base = OTHER; note = 2'-O-Methyl-guanosine
  modified_base 40: mod_base = OTHER; note = 2'-O-Methyl-cytidine
  modified_base 41: mod_base = OTHER; note = 2'-O-Methyl-adenosine
  modified_base 42: mod_base = OTHER; note = 2'-O-Methyl-adenosine
  modified_base 46: mod_base = OTHER; note = 2'-O-Methyl-adenosine
  modified_base 48: mod_base = OTHER; note = 2'-O-Methyl-adenosine
  modified_base 50: mod_base = OTHER; note = 2'-O-Methyl-uridine
  modified_base 52: mod_base = OTHER; note = 2'-O-Methyl-adenosine
  modified_base 53: mod_base = OTHER; note = 2'-O-Methyl-guanosine
  modified_base 54: mod_base = OTHER; note = 2'-O-Methyl-guanosine
  modified_base 55: mod_base = OTHER; note = 2'-O-Methyl-cytidine
  modified_base 56: mod_base = OTHER; note = 2'-O-Methyl-uridine
  modified_base 57: mod_base = OTHER; note = 2'-O-Methyl-adenosine
  modified_base 60: mod_base = OTHER; note = 2'-O-Methyl-cytidine
  modified_base 61: mod_base = OTHER; note = 2'-O-Methyl-cytidine
  modified_base 66: mod_base = OTHER; note = 2'-O-Methyl-uridine
  modified_base 67: mod_base = OTHER; note = 2'-O-Methyl-cytidine
  modified_base 70: mod_base = OTHER; note = 2'-O-Methyl-cytidine
  modified_base 71: mod_base = OTHER; note = 2'-O-Methyl-uridine
  modified_base 72: mod_base = OTHER; note = 2'-O-Methyl-uridine
  modified_base 73: mod_base = OTHER; note = 2'-O-Methyl-guanosine
  modified_base 74: mod_base = OTHER; note = 2'-O-Methyl-adenosine
  modified_base 75: mod_base = OTHER; note = 2'-O-Methyl-adenosine
  modified_base 76: mod_base = OTHER; note = 2'-O-Methyl-adenosine
  modified_base 77: mod_base = OTHER; note = 2'-O-Methyl-adenosine
  modified_base 78: mod_base = OTHER; note = 2'-O-Methyl-adenosine
  modified_base 79: mod_base = OTHER; note = 2'-O-Methyl-guanosine
  modified_base 80: mod_base = OTHER; note = 2'-O-Methyl-uridine
  modified_base 81: mod_base = OTHER; note = 2'-O-Methyl-guanosine
  modified_base 83: mod_base = OTHER; note = 2'-O-Methyl-cytidine
  modified_base 84: mod_base = OTHER; note = 2'-O-Methyl-adenosine
  modified_base 85: mod_base = OTHER; note = 2'-O-Methyl-cytidine
  modified_base 86: mod_base = OTHER; note = 2'-O-Methyl-cytidine
  modified_base 87: mod_base = OTHER; note = 2'-O-Methyl-guanosine
  modified_base 88: mod_base = OTHER; note = 2'-O-Methyl-adenosine
  modified_base 89: mod_base = OTHER; note = 2'-O-Methyl-guanosine
  modified_base 90: mod_base = OTHER; note = 2'-O-Methyl-uridine
  modified_base 91: mod_base = OTHER; note = 2'-O-Methyl-cytidine
  modified_base 92: mod_base = OTHER; note = 2'-O-Methyl-guanosine
  modified_base 93: mod_base = OTHER; note = 2'-O-Methyl-guanosine
  modified_base 94: mod_base = OTHER; note = 2'-O-Methyl-uridine
  modified_base 95: mod_base = OTHER; note = 2'-O-Methyl-guanosine
  modified_base 96: mod_base = OTHER; note = 2'-O-Methyl-cytidine
  modified_base 97: mod_base = OTHER; note = 2'-O-Methyl-uridine phosphorothioate
  modified_base 98: mod_base = OTHER; note = 2'-O-Methyl-uridine phosphorothioate
  modified_base 99: mod_base = OTHER; note = 2'-O-Methyl-uridine phosphorothioate
  modified_base 100: mod_base = OTHER; note = 2'-O-Methyl-uridine

SEQ ID NO: 3171 - RNA, 100 nt, synthetic construct; identical to SEQ ID NO: 1622
  source 1..100: mol_type = other RNA
  modified_base 1: mod_base = OTHER; note = 2'-O-Methyl-inosine phosphorothioate
  modified_base 2: mod_base = OTHER; note = 2'-O-Methyl-cytidine phosphorothioate
  modified_base 3: mod_base = OTHER; note = 2'-O-Methyl-cytidine phosphorothioate
  modified_base 21: mod_base = OTHER; note = 2'-O-Methyl-guanosine
  modified_base 28: mod_base = OTHER; note = 2'-O-Methyl-adenosine
  modified_base 29: mod_base = OTHER; note = 2'-O-Methyl-guanosine
  modified_base 30: mod_base = OTHER; note = 2'-O-Methyl-cytidine
  modified_base 31: mod_base = OTHER; note = 2'-O-Methyl-uridine
  modified_base 32: mod_base = OTHER; note = 2'-O-Methyl-adenosine
  modified_base 33: mod_base = OTHER; note = 2'-O-Methyl-guanosine
  modified_base 34: mod_base = OTHER; note = 2'-O-Methyl-adenosine
  modified_base 35: mod_base = OTHER; note = 2'-O-Methyl-adenosine
  modified_base 36: mod_base = OTHER; note = 2'-O-Methyl-adenosine
  modified_base 37: mod_base = OTHER; note = 2'-O-Methyl-uridine
  modified_base 38: mod_base = OTHER; note = 2'-O-Methyl-adenosine
  modified_base 39: mod_base = OTHER; note = 2'-O-Methyl-guanosine
  modified_base 40: mod_base = OTHER; note = 2'-O-Methyl-cytidine
  modified_base 41: mod_base = OTHER; note = 2'-O-Methyl-adenosine
  modified_base 42: mod_base = OTHER; note = 2'-O-Methyl-adenosine
  modified_base 46: mod_base = OTHER; note = 2'-O-Methyl-adenosine
  modified_base 48: mod_base = OTHER; note = 2'-O-Methyl-adenosine
  modified_base 50: mod_base = OTHER; note = 2'-O-Methyl-uridine
  modified_base 52: mod_base = OTHER; note = 2'-O-Methyl-adenosine
  modified_base 53: mod_base = OTHER; note = 2'-O-Methyl-guanosine
  modified_base 54: mod_base = OTHER; note = 2'-O-Methyl-guanosine
  modified_base 55: mod_base = OTHER; note = 2'-O-Methyl-cytidine
  modified_base 56: mod_base = OTHER; note = 2'-O-Methyl-uridine
  modified_base 57: mod_base = OTHER; note = 2'-O-Methyl-adenosine
  modified_base 60: mod_base = OTHER; note = 2'-O-Methyl-cytidine
  modified_base 61: mod_base = OTHER; note = 2'-O-Methyl-cytidine
  modified_base 66: mod_base = OTHER; note = 2'-O-Methyl-uridine
  modified_base 67: mod_base = OTHER; note = 2'-O-Methyl-cytidine
  modified_base 70: mod_base = OTHER; note = 2'-O-Methyl-cytidine
  modified_base 71: mod_base = OTHER; note = 2'-O-Methyl-uridine
  modified_base 72: mod_base = OTHER; note = 2'-O-Methyl-uridine
  modified_base 73: mod_base = OTHER; note = 2'-O-Methyl-guanosine
  modified_base 74: mod_base = OTHER; note = 2'-O-Methyl-adenosine
  modified_base 75: mod_base = OTHER; note = 2'-O-Methyl-adenosine
  modified_base 76: mod_base = OTHER; note = 2'-O-Methyl-adenosine
  modified_base 77: mod_base = OTHER; note = 2'-O-Methyl-adenosine
  modified_base 78: mod_base = OTHER; note = 2'-O-Methyl-adenosine
  modified_base 79: mod_base = OTHER; note = 2'-O-Methyl-guanosine
  modified_base 80: mod_base = OTHER; note = 2'-O-Methyl-uridine
  modified_base 81: mod_base = OTHER; note = 2'-O-Methyl-guanosine
  modified_base 83: mod_base = OTHER; note = 2'-O-Methyl-cytidine
  modified_base 84: mod_base = OTHER; note = 2'-O-Methyl-adenosine
  modified_base 85: mod_base = OTHER; note = 2'-O-Methyl-cytidine
  modified_base 86: mod_base = OTHER; note = 2'-O-Methyl-cytidine
  modified_base 87: mod_base = OTHER; note = 2'-O-Methyl-guanosine
  modified_base 88: mod_base = OTHER; note = 2'-O-Methyl-adenosine
  modified_base 89: mod_base = OTHER; note = 2'-O-Methyl-guanosine
  modified_base 90: mod_base = OTHER; note = 2'-O-Methyl-uridine
  modified_base 91: mod_base = OTHER; note = 2'-O-Methyl-cytidine
  modified_base 92: mod_base = OTHER; note = 2'-O-Methyl-guanosine
  modified_base 93: mod_base = OTHER; note = 2'-O-Methyl-guanosine
  modified_base 94: mod_base = OTHER; note = 2'-O-Methyl-uridine
  modified_base 95: mod_base = OTHER; note = 2'-O-Methyl-guanosine
  modified_base 96: mod_base = OTHER; note = 2'-O-Methyl-cytidine
  modified_base 97: mod_base = OTHER; note = 2'-O-Methyl-uridine phosphorothioate
  modified_base 98: mod_base = OTHER; note = 2'-O-Methyl-uridine phosphorothioate
  modified_base 99: mod_base = OTHER; note = 2'-O-Methyl-uridine phosphorothioate
  modified_base 100: mod_base = OTHER; note = 2'-O-Methyl-uridine

SEQ ID NO: 3172 - RNA, 99 nt, synthetic construct; identical to SEQ ID NO: 1623
  source 1..99: mol_type = other RNA
  modified_base 1: mod_base = OTHER; note = 2'-O-Methyl-cytidine phosphorothioate
  modified_base 2: mod_base = OTHER; note = 2'-O-Methyl-cytidine phosphorothioate
  modified_base 20: mod_base = OTHER; note = 2'-O-Methyl-guanosine
  modified_base 27: mod_base = OTHER; note = 2'-O-Methyl-adenosine
  modified_base 28: mod_base = OTHER; note = 2'-O-Methyl-guanosine
  modified_base 29: mod_base = OTHER; note = 2'-O-Methyl-cytidine
  modified_base 30: mod_base = OTHER; note = 2'-O-Methyl-uridine
  modified_base 31: mod_base = OTHER; note = 2'-O-Methyl-adenosine
  modified_base 32: mod_base = OTHER; note = 2'-O-Methyl-guanosine
  modified_base 33: mod_base = OTHER; note = 2'-O-Methyl-adenosine
  modified_base 34: mod_base = OTHER; note = 2'-O-Methyl-adenosine
  modified_base 35: mod_base = OTHER; note = 2'-O-Methyl-adenosine
  modified_base 36: mod_base = OTHER; note = 2'-O-Methyl-uridine
  modified_base 37: mod_base = OTHER; note = 2'-O-Methyl-adenosine
  modified_base 38: mod_base = OTHER; note = 2'-O-Methyl-guanosine
  modified_base 39: mod_base = OTHER; note = 2'-O-Methyl-cytidine
  modified_base 40: mod_base = OTHER; note = 2'-O-Methyl-adenosine
  modified_base 41: mod_base = OTHER; note = 2'-O-Methyl-adenosine
  modified_base 45: mod_base = OTHER; note = 2'-O-Methyl-adenosine
  modified_base 47: mod_base = OTHER; note = 2'-O-Methyl-adenosine
  modified_base 49: mod_base = OTHER; note = 2'-O-Methyl-uridine
  modified_base 51: mod_base = OTHER; note = 2'-O-Methyl-adenosine
  modified_base 52: mod_base = OTHER; note = 2'-O-Methyl-guanosine
  modified_base 53: mod_base = OTHER; note = 2'-O-Methyl-guanosine
  modified_base 54: mod_base = OTHER; note = 2'-O-Methyl-cytidine
  modified_base 55: mod_base = OTHER; note = 2'-O-Methyl-uridine
  modified_base 56: mod_base = OTHER; note = 2'-O-Methyl-adenosine
  modified_base 59: mod_base = OTHER; note = 2'-O-Methyl-cytidine
  modified_base 60: mod_base = OTHER; note = 2'-O-Methyl-cytidine
  modified_base 65: mod_base = OTHER; note = 2'-O-Methyl-uridine
  modified_base 66: mod_base = OTHER; note = 2'-O-Methyl-cytidine
  modified_base 69: mod_base = OTHER; note = 2'-O-Methyl-cytidine
  modified_base 70: mod_base = OTHER; note = 2'-O-Methyl-uridine
  modified_base 71: mod_base = OTHER; note = 2'-O-Methyl-uridine
  modified_base 72: mod_base = OTHER; note = 2'-O-Methyl-guanosine
  modified_base 73: mod_base = OTHER; note = 2'-O-Methyl-adenosine
  modified_base 74: mod_base = OTHER; note = 2'-O-Methyl-adenosine
  modified_base 75: mod_base = OTHER; note = 2'-O-Methyl-adenosine
  modified_base 76: mod_base = OTHER; note = 2'-O-Methyl-adenosine
  modified_base 77: mod_base = OTHER; note = 2'-O-Methyl-adenosine
  modified_base 78: mod_base = OTHER; note = 2'-O-Methyl-guanosine
  modified_base 79: mod_base = OTHER; note = 2'-O-Methyl-uridine
  modified_base 80: mod_base = OTHER; note = 2'-O-Methyl-guanosine
  modified_base 82: mod_base = OTHER; note = 2'-O-Methyl-cytidine
  modified_base 83: mod_base = OTHER; note = 2'-O-Methyl-adenosine
  modified_base 84: mod_base = OTHER; note = 2'-O-Methyl-cytidine
  modified_base 85: mod_base = OTHER; note = 2'-O-Methyl-cytidine
  modified_base 86: mod_base = OTHER; note = 2'-O-Methyl-guanosine
  modified_base 87: mod_base = OTHER; note = 2'-O-Methyl-adenosine
  modified_base 88: mod_base = OTHER; note = 2'-O-Methyl-guanosine
  modified_base 89: mod_base = OTHER; note = 2'-O-Methyl-uridine
  modified_base 90: mod_base = OTHER; note = 2'-O-Methyl-cytidine
  modified_base 91: mod_base = OTHER; note = 2'-O-Methyl-guanosine
  modified_base 92: mod_base = OTHER; note = 2'-O-Methyl-guanosine
  modified_base 93: mod_base = OTHER; note = 2'-O-Methyl-uridine
  modified_base 94: mod_base = OTHER; note = 2'-O-Methyl-guanosine
  modified_base 95: mod_base = OTHER; note = 2'-O-Methyl-cytidine
  modified_base 96: mod_base = OTHER; note = 2'-O-Methyl-uridine phosphorothioate
  modified_base 97: mod_base = OTHER; note = 2'-O-Methyl-uridine phosphorothioate
  modified_base 98: mod_base = OTHER; note = 2'-O-Methyl-uridine phosphorothioate
  modified_base 99: mod_base = OTHER; note = 2'-O-Methyl-uridine

SEQ ID NO: 3173 - RNA, 100 nt, synthetic construct; identical to SEQ ID NO: 370
  source 1..100: mol_type = other RNA
  modified_base 1: mod_base = OTHER; note = 2'-O-Methyl-cytidine phosphorothioate
  modified_base 2: mod_base = OTHER; note = 2'-O-Methyl-cytidine phosphorothioate
  modified_base 3: mod_base = OTHER; note = 2'-O-Methyl-adenosine phosphorothioate
  modified_base 21: mod_base = OTHER; note = 2'-O-Methyl-guanosine
  modified_base 28: mod_base = OTHER; note = 2'-O-Methyl-adenosine
  modified_base 29: mod_base = OTHER; note = 2'-O-Methyl-guanosine
  modified_base 30: mod_base = OTHER; note = 2'-O-Methyl-cytidine
  modified_base 31: mod_base = OTHER; note = 2'-O-Methyl-uridine
  modified_base 32: mod_base = OTHER; note = 2'-O-Methyl-adenosine
  modified_base 33: mod_base = OTHER; note = 2'-O-Methyl-guanosine
  modified_base 34: mod_base = OTHER; note = 2'-O-Methyl-adenosine
  modified_base 35: mod_base = OTHER; note = 2'-O-Methyl-adenosine
  modified_base 36: mod_base = OTHER; note = 2'-O-Methyl-adenosine
  modified_base 37: mod_base = OTHER; note = 2'-O-Methyl-uridine
  modified_base 38: mod_base = OTHER; note = 2'-O-Methyl-adenosine
  modified_base 39: mod_base = OTHER; note = 2'-O-Methyl-guanosine
  modified_base 40: mod_base = OTHER; note = 2'-O-Methyl-cytidine
  modified_base 41: mod_base = OTHER; note = 2'-O-Methyl-adenosine
  modified_base 42: mod_base = OTHER; note = 2'-O-Methyl-adenosine
  modified_base 46: mod_base = OTHER; note = 2'-O-Methyl-adenosine
  modified_base 48: mod_base = OTHER; note = 2'-O-Methyl-adenosine
  modified_base 50: mod_base = OTHER; note = 2'-O-Methyl-uridine
  modified_base 52: mod_base = OTHER; note = 2'-O-Methyl-adenosine
  modified_base 53: mod_base = OTHER; note = 2'-O-Methyl-guanosine
  modified_base 54: mod_base = OTHER; note = 2'-O-Methyl-guanosine
  modified_base 55: mod_base = OTHER; note = 2'-O-Methyl-cytidine
  modified_base 56: mod_base = OTHER; note = 2'-O-Methyl-uridine
  modified_base 57: mod_base = OTHER; note = 2'-O-Methyl-adenosine
  modified_base 60: mod_base = OTHER; note = 2'-O-Methyl-cytidine
  modified_base 61: mod_base = OTHER; note = 2'-O-Methyl-cytidine
  modified_base 66: mod_base = OTHER; note = 2'-O-Methyl-uridine
  modified_base 67: mod_base = OTHER; note = 2'-O-Methyl-cytidine
  modified_base 70: mod_base = OTHER; note = 2'-O-Methyl-cytidine
  modified_base 71: mod_base = OTHER; note = 2'-O-Methyl-uridine
  modified_base 72: mod_base = OTHER; note = 2'-O-Methyl-uridine
  modified_base 73: mod_base = OTHER; note = 2'-O-Methyl-guanosine
  modified_base 74: mod_base = OTHER; note = 2'-O-Methyl-adenosine
  modified_base 75: mod_base = OTHER; note = 2'-O-Methyl-adenosine
  modified_base 76: mod_base = OTHER; note = 2'-O-Methyl-adenosine
  modified_base 77: mod_base = OTHER; note = 2'-O-Methyl-adenosine
  modified_base 78: mod_base = OTHER; note = 2'-O-Methyl-adenosine
  modified_base 79: mod_base = OTHER; note = 2'-O-Methyl-guanosine
  modified_base 80: mod_base = OTHER; note = 2'-O-Methyl-uridine
  modified_base 81: mod_base = OTHER; note = 2'-O-Methyl-guanosine
  modified_base 83: mod_base = OTHER; note = 2'-O-Methyl-cytidine
  modified_base 84: mod_base = OTHER; note = 2'-O-Methyl-adenosine
  modified_base 85: mod_base = OTHER; note = 2'-O-Methyl-cytidine
  modified_base 86: mod_base = OTHER; note = 2'-O-Methyl-cytidine
  modified_base 87: mod_base = OTHER; note = 2'-O-Methyl-guanosine
  modified_base 88: mod_base = OTHER; note = 2'-O-Methyl-adenosine
  modified_base 89: mod_base = OTHER; note = 2'-O-Methyl-guanosine
  modified_base 90: mod_base = OTHER; note = 2'-O-Methyl-uridine
  modified_base 91: mod_base = OTHER; note = 2'-O-Methyl-cytidine
  modified_base 92: mod_base = OTHER; note = 2'-O-Methyl-guanosine
  modified_base 93: mod_base = OTHER; note = 2'-O-Methyl-guanosine
  modified_base 94: mod_base = OTHER; note = 2'-O-Methyl-uridine
  modified_base 95: mod_base = OTHER; note = 2'-O-Methyl-guanosine
  modified_base 96: mod_base = OTHER; note = 2'-O-Methyl-cytidine
  modified_base 97: mod_base = OTHER; note = 2'-O-Methyl-uridine phosphorothioate
  modified_base 98: mod_base = OTHER; note = 2'-O-Methyl-uridine phosphorothioate
  modified_base 99: mod_base = OTHER; note = 2'-O-Methyl-uridine phosphorothioate
  modified_base 100: mod_base = OTHER; note = 2'-O-Methyl-uridine

SEQ ID NO: 3174 - RNA, 100 nt, synthetic construct; identical to SEQ ID NO: 381
  source 1..100: mol_type = other RNA
  modified_base 1: mod_base = OTHER; note = 2'-O-Methyl-cytidine phosphorothioate
  modified_base 2: mod_base = OTHER; note = 2'-O-Methyl-uridine phosphorothioate
  modified_base 3: mod_base = OTHER; note = 2'-O-Methyl-uridine phosphorothioate
  modified_base 21: mod_base = OTHER; note = 2'-O-Methyl-guanosine
  modified_base 28: mod_base = OTHER; note = 2'-O-Methyl-adenosine
  modified_base 29: mod_base = OTHER; note = 2'-O-Methyl-guanosine
  modified_base 30: mod_base = OTHER; note = 2'-O-Methyl-cytidine
  modified_base 31: mod_base = OTHER; note = 2'-O-Methyl-uridine
  modified_base 32: mod_base = OTHER; note = 2'-O-Methyl-adenosine
  modified_base 33: mod_base = OTHER; note = 2'-O-Methyl-guanosine
  modified_base 34: mod_base = OTHER; note = 2'-O-Methyl-adenosine
  modified_base 35: mod_base = OTHER; note = 2'-O-Methyl-adenosine
  modified_base 36: mod_base = OTHER; note = 2'-O-Methyl-adenosine
  modified_base 37: mod_base = OTHER; note = 2'-O-Methyl-uridine
  modified_base 38: mod_base = OTHER; note = 2'-O-Methyl-adenosine
  modified_base 39: mod_base = OTHER; note = 2'-O-Methyl-guanosine
  modified_base 40: mod_base = OTHER; note = 2'-O-Methyl-cytidine
  modified_base 41: mod_base = OTHER; note = 2'-O-Methyl-adenosine
  modified_base 42: mod_base = OTHER; note = 2'-O-Methyl-adenosine
  modified_base 46: mod_base = OTHER; note = 2'-O-Methyl-adenosine
  modified_base 48: mod_base = OTHER; note = 2'-O-Methyl-adenosine
  modified_base 50: mod_base = OTHER; note = 2'-O-Methyl-uridine
  modified_base 52: mod_base = OTHER; note = 2'-O-Methyl-adenosine
  modified_base 53: mod_base = OTHER; note = 2'-O-Methyl-guanosine
  modified_base 54: mod_base = OTHER; note = 2'-O-Methyl-guanosine
  modified_base 55: mod_base = OTHER; note = 2'-O-Methyl-cytidine
  modified_base 56: mod_base = OTHER; note = 2'-O-Methyl-uridine
  modified_base 57: mod_base = OTHER; note = 2'-O-Methyl-adenosine
  modified_base 60: mod_base = OTHER; note = 2'-O-Methyl-cytidine
  modified_base 61: mod_base = OTHER; note = 2'-O-Methyl-cytidine
  modified_base 66: mod_base = OTHER; note = 2'-O-Methyl-uridine
  modified_base 67: mod_base = OTHER; note = 2'-O-Methyl-cytidine
  modified_base 70: mod_base = OTHER; note = 2'-O-Methyl-cytidine
  modified_base 71: mod_base = OTHER; note = 2'-O-Methyl-uridine
  modified_base 72: mod_base = OTHER; note = 2'-O-Methyl-uridine
  modified_base 73: mod_base = OTHER; note = 2'-O-Methyl-guanosine
  modified_base 74: mod_base = OTHER; note = 2'-O-Methyl-adenosine
  modified_base 75: mod_base = OTHER; note = 2'-O-Methyl-adenosine
  modified_base 76: mod_base = OTHER; note = 2'-O-Methyl-adenosine
  modified_base 77: mod_base = OTHER; note = 2'-O-Methyl-adenosine
  modified_base 78: mod_base = OTHER; note = 2'-O-Methyl-adenosine
  modified_base 79: mod_base = OTHER; note = 2'-O-Methyl-guanosine
  modified_base 80: mod_base = OTHER; note = 2'-O-Methyl-uridine
  modified_base 81: mod_base = OTHER; note = 2'-O-Methyl-guanosine
  modified_base 83: mod_base = OTHER; note = 2'-O-Methyl-cytidine
  modified_base 84: mod_base = OTHER; note = 2'-O-Methyl-adenosine
  modified_base 85: mod_base = OTHER; note = 2'-O-Methyl-cytidine
  modified_base 86: mod_base = OTHER; note = 2'-O-Methyl-cytidine
  modified_base 87: mod_base = OTHER; note = 2'-O-Methyl-guanosine
  modified_base 88: mod_base = OTHER; note = 2'-O-Methyl-adenosine
  modified_base 89: mod_base = OTHER; note = 2'-O-Methyl-guanosine
  modified_base 90: mod_base = OTHER; note = 2'-O-Methyl-uridine
  modified_base 91: mod_base = OTHER; note = 2'-O-Methyl-cytidine
  modified_base 92: mod_base = OTHER; note = 2'-O-Methyl-guanosine
  modified_base 93: mod_base = OTHER; note = 2'-O-Methyl-guanosine
  modified_base 94: mod_base = OTHER; note = 2'-O-Methyl-uridine
  modified_base 95: mod_base = OTHER; note = 2'-O-Methyl-guanosine
  modified_base 96: mod_base = OTHER; note = 2'-O-Methyl-cytidine
  modified_base 97: mod_base = OTHER; note = 2'-O-Methyl-uridine phosphorothioate
  modified_base 98: mod_base = OTHER; note = 2'-O-Methyl-uridine phosphorothioate
  modified_base 99: mod_base = OTHER; note = 2'-O-Methyl-uridine phosphorothioate
  modified_base 100: mod_base = OTHER; note = 2'-O-Methyl-uridine

SEQ ID NO: 3175 - RNA, 103 nt, synthetic construct; identical to SEQ ID NO: 1700
  source 1..103: mol_type = other RNA
  modified_base 1: mod_base = OTHER; note = 2'-O-Methyl-cytidine phosphorothioate
  modified_base 2: mod_base = OTHER; note = 2'-O-Methyl-adenosine phosphorothioate
  modified_base 3: mod_base = OTHER; note = 2'-O-Methyl-guanosine phosphorothioate
  modified_base 21: mod_base = OTHER; note = 2'-O-Methyl-guanosine
  modified_base 28: mod_base = OTHER; note = 2'-O-Methyl-adenosine
  modified_base 29: mod_base = OTHER; note = 2'-O-Methyl-guanosine
  modified_base 30: mod_base = OTHER; note = 2'-O-Methyl-cytidine
  modified_base 31: mod_base = OTHER; note = 2'-O-Methyl-uridine
  modified_base 32: mod_base = OTHER; note = 2'-O-Methyl-adenosine
  modified_base 34: mod_base = OTHER; note = 2'-O-Methyl-adenosine
  modified_base 35: mod_base = OTHER; note = 2'-O-Methyl-adenosine
  modified_base 36: mod_base = OTHER; note = 2'-O-Methyl-adenosine
  modified_base 37: mod_base = OTHER; note = 2'-O-Methyl-uridine
  modified_base 38: mod_base = OTHER; note = 2'-O-Methyl-adenosine
  modified_base 39: mod_base = OTHER; note = 2'-O-Methyl-guanosine
  modified_base 40: mod_base = OTHER; note = 2'-O-Methyl-cytidine
  modified_base 41: mod_base = OTHER; note = 2'-O-Methyl-adenosine
  modified_base 42: mod_base = OTHER; note = 2'-O-Methyl-adenosine
  modified_base 45: mod_base = OTHER; note = uridine phosphorothioate
  modified_base 46: mod_base = OTHER; note = 2'-O-Methyl-adenosine
  modified_base 48: mod_base = OTHER; note = 2'-O-Methyl-adenosine
  modified_base 50: mod_base = OTHER; note = 2'-O-Methyl-uridine
  modified_base 52: mod_base = OTHER; note = 2'-O-Methyl-adenosine
  modified_base 53: mod_base = OTHER; note = 2'-O-Methyl-guanosine
  modified_base 54: mod_base = OTHER; note = 2'-O-Methyl-guanosine
  modified_base 55: mod_base = OTHER; note = 2'-O-Methyl-cytidine
  modified_base 56: mod_base = OTHER; note = 2'-O-Methyl-uridine
  modified_base 57: mod_base = OTHER; note = 2'-O-Methyl-adenosine
  modified_base 60: mod_base = OTHER; note = 2'-O-Methyl-cytidine
  modified_base 61: mod_base = OTHER; note = 2'-O-Methyl-cytidine
  modified_base 64: mod_base = OTHER; note = uridine phosphorothioate
  modified_base 66: mod_base = OTHER; note = 2'-O-Methyl-uridine
  modified_base 67: mod_base = OTHER; note = 2'-O-Methyl-cytidine
  modified_base 70: mod_base = OTHER; note = 2'-O-Methyl-cytidine
  modified_base 71: mod_base = OTHER; note = 2'-O-Methyl-uridine
  modified_base 72: mod_base = OTHER; note = 2'-O-Methyl-uridine
  modified_base 74: mod_base = OTHER; note = 2'-O-Methyl-adenosine
  modified_base 75: mod_base = OTHER; note = 2'-O-Methyl-adenosine
  modified_base 76: mod_base = OTHER; note = 2'-O-Methyl-adenosine
  modified_base 77: mod_base = OTHER; note = 2'-O-Methyl-adenosine
  modified_base 78: mod_base = OTHER; note = 2'-O-Methyl-adenosine
  modified_base 79: mod_base = OTHER; note = 2'-O-Methyl-guanosine
  modified_base 80: mod_base = OTHER; note = 2'-O-Methyl-uridine
  modified_base 81: mod_base = OTHER; note = 2'-O-Methyl-guanosine
  modified_base 83: mod_base = OTHER; note = 2'-O-Methyl-cytidine
  modified_base 84: mod_base = OTHER; note = 2'-O-Methyl-adenosine
  modified_base 85: mod_base = OTHER; note = 2'-O-Methyl-cytidine
  modified_base 86: mod_base = OTHER; note = 2'-O-Methyl-cytidine
  modified_base 87: mod_base = OTHER; note = 2'-O-Methyl-guanosine
  modified_base 88: mod_base = OTHER; note = 2'-O-Methyl-adenosine
  modified_base 89: mod_base = OTHER; note = 2'-O-Methyl-guanosine
  modified_base 90: mod_base = OTHER; note = 2'-O-Methyl-uridine
  modified_base 91: mod_base = OTHER; note = 2'-O-Methyl-cytidine
  modified_base 92: mod_base = OTHER; note = 2'-O-Methyl-guanosine
  modified_base 93: mod_base = OTHER; note = 2'-O-Methyl-guanosine
  modified_base 94: mod_base = OTHER; note = 2'-O-Methyl-uridine
  modified_base 95: mod_base = OTHER; note = 2'-O-Methyl-guanosine
  modified_base 96: mod_base = OTHER; note = 2'-O-Methyl-cytidine
  modified_base 97: mod_base = OTHER; note = 2'-O-Methyl-uridine
  modified_base 98: mod_base = OTHER; note = 2'-O-Methyl-uridine phosphorothioate
  modified_base 99: mod_base = OTHER; note = 2'-O-Methyl-uridine phosphorothioate
  modified_base 100: mod_base = OTHER; note = 2'-O-Methyl-uridine
  modified_base 101: mod_base = OTHER; note = 2'-O-Methyl-uridine
  modified_base 102: mod_base = OTHER; note = 2'-O-Methyl-uridine
  modified_base 103: mod_base = OTHER; note = 2'-O-Methyl-uridine

SEQ ID NO: 3176 - RNA, 103 nt, synthetic construct; identical to SEQ ID NO: 1700
  source 1..103: mol_type = other RNA
  modified_base 1: mod_base = OTHER; note = 2'-O-Methyl-cytidine phosphorothioate
  modified_base 2: mod_base = OTHER; note = 2'-O-Methyl-adenosine phosphorothioate
  modified_base 3: mod_base = OTHER; note = 2'-O-Methyl-guanosine phosphorothioate
  modified_base 21: mod_base = OTHER; note = 2'-O-Methyl-guanosine
  modified_base 28: mod_base = OTHER; note = 2'-O-Methyl-adenosine
  modified_base 29: mod_base = OTHER; note = 2'-O-Methyl-guanosine
  modified_base 30: mod_base = OTHER; note = 2'-O-Methyl-cytidine
  modified_base 31: mod_base = OTHER; note = 2'-O-Methyl-uridine
  modified_base 32: mod_base = OTHER; note = 2'-O-Methyl-adenosine
  modified_base 34: mod_base = OTHER; note = 2'-O-Methyl-adenosine
  modified_base 35: mod_base = OTHER; note = 2'-O-Methyl-adenosine
  modified_base 36: mod_base = OTHER; note = 2'-O-Methyl-adenosine
  modified_base 37: mod_base = OTHER; note = 2'-O-Methyl-uridine
  modified_base 38: mod_base = OTHER; note = 2'-O-Methyl-adenosine
  modified_base 39: mod_base = OTHER; note = 2'-O-Methyl-guanosine
  modified_base 40: mod_base = OTHER; note = 2'-O-Methyl-cytidine
  modified_base 41: mod_base = OTHER; note = 2'-O-Methyl-adenosine
  modified_base 42: mod_base = OTHER; note = 2'-O-Methyl-adenosine
  modified_base 45: mod_base = OTHER; note = uridine phosphorothioate
  modified_base 46: mod_base = OTHER; note = 2'-O-Methyl-adenosine
  modified_base 48: mod_base = OTHER; note = 2'-O-Methyl-adenosine
  modified_base 50: mod_base = OTHER; note = 2'-O-Methyl-uridine
  modified_base 52: mod_base = OTHER; note = 2'-O-Methyl-adenosine
  modified_base 53: mod_base = OTHER; note = 2'-O-Methyl-guanosine
  modified_base 54: mod_base = OTHER; note = 2'-O-Methyl-guanosine
  modified_base 55: mod_base = OTHER; note = 2'-O-Methyl-cytidine
  modified_base 56: mod_base = OTHER; note = 2'-O-Methyl-uridine
  modified_base 57: mod_base = OTHER; note = 2'-O-Methyl-adenosine
  modified_base 60: mod_base = OTHER; note = 2'-O-Methyl-cytidine
  modified_base 61: mod_base = OTHER; note = 2'-O-Methyl-cytidine
  modified_base 66: mod_base = OTHER; note = 2'-O-Methyl-uridine
  modified_base 67: mod_base = OTHER; note = 2'-O-Methyl-cytidine
  modified_base 70: mod_base = OTHER; note = 2'-O-Methyl-cytidine
  modified_base 71: mod_base = OTHER; note = 2'-O-Methyl-uridine
  modified_base 72: mod_base = OTHER; note = 2'-O-Methyl-uridine
  modified_base 74: mod_base = OTHER; note = 2'-O-Methyl-adenosine
  modified_base 75: mod_base = OTHER; note = 2'-O-Methyl-adenosine
  modified_base 76: mod_base = OTHER; note = 2'-O-Methyl-adenosine
  modified_base 77: mod_base = OTHER; note = 2'-O-Methyl-adenosine
  modified_base 78: mod_base = OTHER; note = 2'-O-Methyl-adenosine
  modified_base 79: mod_base = OTHER; note = 2'-O-Methyl-guanosine
  modified_base 80: mod_base = OTHER; note = 2'-O-Methyl-uridine
  modified_base 81: mod_base = OTHER; note = 2'-O-Methyl-guanosine
  modified_base 83: mod_base = OTHER; note = 2'-O-Methyl-cytidine
  modified_base 84: mod_base = OTHER; note = 2'-O-Methyl-adenosine
  modified_base 85: mod_base = OTHER; note = 2'-O-Methyl-cytidine
  modified_base 86: mod_base = OTHER; note = 2'-O-Methyl-cytidine
  modified_base 87: mod_base = OTHER; note = 2'-O-Methyl-guanosine
  modified_base 88: mod_base = OTHER; note = 2'-O-Methyl-adenosine
  modified_base 89: mod_base = OTHER; note = 2'-O-Methyl-guanosine
  modified_base 90: mod_base = OTHER; note = 2'-O-Methyl-uridine
  modified_base 91: mod_base = OTHER; note = 2'-O-Methyl-cytidine
  modified_base 92: mod_base = OTHER; note = 2'-O-Methyl-guanosine
  modified_base 93: mod_base = OTHER; note = 2'-O-Methyl-guanosine
  modified_base 94: mod_base = OTHER; note = 2'-O-Methyl-uridine
  modified_base 95: mod_base = OTHER; note = 2'-O-Methyl-guanosine
  modified_base 96: mod_base = OTHER; note = 2'-O-Methyl-cytidine
  modified_base 97: mod_base = OTHER; note = 2'-O-Methyl-uridine
  modified_base 98: mod_base = OTHER; note = 2'-O-Methyl-uridine phosphorothioate
  modified_base 99: mod_base = OTHER; note = 2'-O-Methyl-uridine phosphorothioate
  modified_base 100: mod_base = OTHER; note = 2'-O-Methyl-uridine
  modified_base 101: mod_base = OTHER; note = 2'-O-Methyl-uridine
  modified_base 102: mod_base = OTHER; note = 2'-O-Methyl-uridine
  modified_base 103: mod_base = OTHER; note = 2'-O-Methyl-uridine

SEQ ID NO: 3177 - RNA, 103 nt, synthetic construct; identical to SEQ ID NO: 1700
  source 1..103: mol_type = other RNA
  modified_base 1: mod_base = OTHER; note = 2'-O-Methyl-cytidine phosphorothioate
  modified_base 2: mod_base = OTHER; note = 2'-O-Methyl-adenosine phosphorothioate
  modified_base 3: mod_base = OTHER; note = 2'-O-Methyl-guanosine phosphorothioate
  modified_base 21: mod_base = OTHER; note = 2'-O-Methyl-guanosine
  modified_base 28: mod_base = OTHER; note = 2'-O-Methyl-adenosine
  modified_base 29: mod_base = OTHER; note = 2'-O-Methyl-guanosine
  modified_base 30: mod_base = OTHER; note = 2'-O-Methyl-cytidine
  modified_base 31: mod_base = OTHER; note = 2'-O-Methyl-uridine
  modified_base 32: mod_base = OTHER; note = 2'-O-Methyl-adenosine
  modified_base 34: mod_base = OTHER; note = 2'-O-Methyl-adenosine
  modified_base 35: mod_base = OTHER; note = 2'-O-Methyl-adenosine
  modified_base 36: mod_base = OTHER; note = 2'-O-Methyl-adenosine
  modified_base 37: mod_base = OTHER; note = 2'-O-Methyl-uridine
  modified_base 38: mod_base = OTHER; note = 2'-O-Methyl-adenosine
  modified_base 39: mod_base = OTHER; note = 2'-O-Methyl-guanosine
  modified_base 40: mod_base = OTHER; note = 2'-O-Methyl-cytidine
  modified_base 41: mod_base = OTHER; note = 2'-O-Methyl-adenosine
  modified_base 42: mod_base = OTHER; note = 2'-O-Methyl-adenosine
  modified_base 46: mod_base = OTHER; note = 2'-O-Methyl-adenosine
  modified_base 48: mod_base = OTHER; note = 2'-O-Methyl-adenosine
  modified_base 50: mod_base = OTHER; note = 2'-O-Methyl-uridine
  modified_base 52: mod_base = OTHER; note = 2'-O-Methyl-adenosine
  modified_base 53: mod_base = OTHER; note = 2'-O-Methyl-guanosine
  modified_base 54: mod_base = OTHER; note = 2'-O-Methyl-guanosine
  modified_base 55: mod_base = OTHER; note = 2'-O-Methyl-cytidine
  modified_base 56: mod_base = OTHER; note = 2'-O-Methyl-uridine
  modified_base 57: mod_base = OTHER; note = 2'-O-Methyl-adenosine
  modified_base 60: mod_base = OTHER; note = 2'-O-Methyl-cytidine
  modified_base 61: mod_base = OTHER; note = 2'-O-Methyl-cytidine
  modified_base 64: mod_base = OTHER; note = uridine phosphorothioate
  modified_base 66: mod_base = OTHER; note = 2'-O-Methyl-uridine
  modified_base 67: mod_base = OTHER; note = 2'-O-Methyl-cytidine
  modified_base 70: mod_base = OTHER; note = 2'-O-Methyl-cytidine
  modified_base 71: mod_base = OTHER; note = 2'-O-Methyl-uridine
  modified_base 72: mod_base = OTHER; note = 2'-O-Methyl-uridine
  modified_base 74: mod_base = OTHER; note = 2'-O-Methyl-adenosine
  modified_base 75: mod_base = OTHER; note = 2'-O-Methyl-adenosine
  modified_base 76: mod_base = OTHER; note = 2'-O-Methyl-adenosine
  modified_base 77: mod_base = OTHER; note = 2'-O-Methyl-adenosine
  modified_base 78: mod_base = OTHER; note = 2'-O-Methyl-adenosine
  modified_base 79: mod_base = OTHER; note = 2'-O-Methyl-guanosine
  modified_base 80: mod_base = OTHER; note = 2'-O-Methyl-uridine
  modified_base 81: mod_base = OTHER; note = 2'-O-Methyl-guanosine
  modified_base 83: mod_base = OTHER; note = 2'-O-Methyl-cytidine
  modified_base 84: mod_base = OTHER; note = 2'-O-Methyl-adenosine
  modified_base 85: mod_base = OTHER; note = 2'-O-Methyl-cytidine
  modified_base 86: mod_base = OTHER; note = 2'-O-Methyl-cytidine
  modified_base 87: mod_base = OTHER; note = 2'-O-Methyl-guanosine
  modified_base 88: mod_base = OTHER; note = 2'-O-Methyl-adenosine
  modified_base 89: mod_base = OTHER; note = 2'-O-Methyl-guanosine
  modified_base 90: mod_base = OTHER; note = 2'-O-Methyl-uridine
  modified_base 91: mod_base = OTHER; note = 2'-O-Methyl-cytidine
  modified_base 92: mod_base = OTHER; note = 2'-O-Methyl-guanosine
  modified_base 93: mod_base = OTHER; note = 2'-O-Methyl-guanosine
  modified_base 94: mod_base = OTHER; note = 2'-O-Methyl-uridine
  modified_base 95: mod_base = OTHER; note = 2'-O-Methyl-guanosine
  modified_base 96: mod_base = OTHER; note = 2'-O-Methyl-cytidine
  modified_base 97: mod_base = OTHER; note = 2'-O-Methyl-uridine
  modified_base 98: mod_base = OTHER; note = 2'-O-Methyl-uridine phosphorothioate
  modified_base 99: mod_base = OTHER; note = 2'-O-Methyl-uridine phosphorothioate
  modified_base 100: mod_base = OTHER; note = 2'-O-Methyl-uridine
  modified_base 101: mod_base = OTHER; note = 2'-O-Methyl-uridine
  modified_base 102: mod_base = OTHER; note = 2'-O-Methyl-uridine
  modified_base 103: mod_base = OTHER; note = 2'-O-Methyl-uridine

SEQ ID NO: 3178 - RNA, 103 nt, synthetic construct; identical to SEQ ID NO: 1700
  source 1..103: mol_type = other RNA
  modified_base 1: mod_base = OTHER; note = 2'-O-Methyl-cytidine phosphorothioate
  modified_base 2: mod_base = OTHER; note = 2'-O-Methyl-adenosine phosphorothioate
  modified_base 3: mod_base = OTHER; note = 2'-O-Methyl-guanosine phosphorothioate
  modified_base 21: mod_base = OTHER; note = 2'-O-Methyl-guanosine
  modified_base 28: mod_base = OTHER; note = 2'-O-Methyl-adenosine
  modified_base 29: mod_base = OTHER; note = 2'-O-Methyl-guanosine
  modified_base 30: mod_base = OTHER; note = 2'-O-Methyl-cytidine
  modified_base 31: mod_base = OTHER; note = 2'-O-Methyl-uridine
  modified_base 32: mod_base = OTHER; note = 2'-O-Methyl-adenosine
  modified_base 34: mod_base = OTHER; note = 2'-O-Methyl-adenosine
  modified_base 35: mod_base = OTHER; note = 2'-O-Methyl-adenosine
  modified_base 36: mod_base = OTHER; note = 2'-O-Methyl-adenosine
  modified_base 37: mod_base = OTHER; note = 2'-O-Methyl-uridine
  modified_base 38: mod_base = OTHER; note = 2'-O-Methyl-adenosine
  modified_base 39: mod_base = OTHER; note = 2'-O-Methyl-guanosine
  modified_base 40: mod_base = OTHER; note = 2'-O-Methyl-cytidine
  modified_base 41: mod_base = OTHER; note = 2'-O-Methyl-adenosine
  modified_base 42: mod_base = OTHER; note = 2'-O-Methyl-adenosine
  modified_base 45: mod_base = OTHER; note = uridine phosphorothioate
  modified_base 46: mod_base = OTHER; note = 2'-O-Methyl-adenosine
  modified_base 48: mod_base = OTHER; note = 2'-O-Methyl-adenosine
  modified_base 50: mod_base = OTHER; note = 2'-O-Methyl-uridine
  modified_base 52: mod_base = OTHER; note = 2'-O-Methyl-adenosine
  modified_base 53: mod_base = OTHER; note = 2'-O-Methyl-guanosine
  modified_base 54: mod_base = OTHER; note = 2'-O-Methyl-guanosine
  modified_base 55: mod_base = OTHER; note = 2'-O-Methyl-cytidine
  modified_base 56: mod_base = OTHER; note = 2'-O-Methyl-uridine
  modified_base 57: mod_base = OTHER; note = 2'-O-Methyl-adenosine
  modified_base 60: mod_base = OTHER; note = 2'-O-Methyl-cytidine
  modified_base 61: mod_base = OTHER; note = 2'-O-Methyl-cytidine
  modified_base 64: mod_base = OTHER; note = uridine phosphorothioate
  modified_base 66: mod_base = OTHER; note = 2'-O-Methyl-uridine
  modified_base 67: mod_base = OTHER; note = 2'-O-Methyl-cytidine
  modified_base 70: mod_base = OTHER; note = 2'-O-Methyl-cytidine
  modified_base 71: mod_base = OTHER; note = 2'-O-Methyl-uridine
  modified_base 72: mod_base = OTHER; note = 2'-O-Methyl-uridine
  modified_base 74: mod_base = OTHER; note = 2'-O-Methyl-adenosine
  modified_base 75: mod_base = OTHER; note = 2'-O-Methyl-adenosine
  modified_base 76: mod_base = OTHER; note = 2'-O-Methyl-adenosine
  modified_base 77: mod_base = OTHER; note = 2'-O-Methyl-adenosine
  modified_base 78: mod_base = OTHER; note = 2'-O-Methyl-adenosine
  modified_base 79: mod_base = OTHER; note = 2'-O-Methyl-guanosine
  modified_base 80: mod_base = OTHER; note = 2'-O-Methyl-uridine
  modified_base 81: mod_base = OTHER; note = 2'-O-Methyl-guanosine
  modified_base 83: mod_base = OTHER; note = 2'-O-Methyl-cytidine
  modified_base 84: mod_base = OTHER; note = 2'-O-Methyl-adenosine
  modified_base 85: mod_base = OTHER; note = 2'-O-Methyl-cytidine
  modified_base 86: mod_base = OTHER; note = 2'-O-Methyl-cytidine
  modified_base 87: mod_base = OTHER; note = 2'-O-Methyl-guanosine
  modified_base 88: mod_base = OTHER; note = 2'-O-Methyl-adenosine
  modified_base 89: mod_base = OTHER; note = 2'-O-Methyl-guanosine
  modified_base 90: mod_base = OTHER; note = 2'-O-Methyl-uridine
  modified_base 91: mod_base = OTHER; note = 2'-O-Methyl-cytidine
  modified_base 92: mod_base = OTHER; note = 2'-O-Methyl-guanosine
  modified_base 93: mod_base = OTHER; note = 2'-O-Methyl-guanosine
  modified_base 94: mod_base = OTHER; note = 2'-O-Methyl-uridine
  modified_base 95: mod_base = OTHER; note = 2'-O-Methyl-guanosine
  modified_base 96: mod_base = OTHER; note = 2'-O-Methyl-cytidine
  modified_base 97: mod_base = OTHER; note = 2'-O-Methyl-uridine
  modified_base 98: mod_base = OTHER; note = 2'-O-Methyl-uridine phosphorothioate
  modified_base 99: mod_base = OTHER; note = 2'-O-Methyl-uridine phosphorothioate
  modified_base 100: mod_base = OTHER; note = 2'-O-Methyl-uridine
  modified_base 101: mod_base = OTHER; note = 2'-O-Methyl-uridine
  modified_base 103: mod_base = OTHER; note = 2'-O-Methyl-uridine

SEQ ID NO: 3179 - RNA, 103 nt, synthetic construct; identical to SEQ ID NO: 1700
  source 1..103: mol_type = other RNA
  modified_base 1: mod_base = OTHER; note = 2'-O-Methyl-cytidine phosphorothioate
  modified_base 2: mod_base = OTHER; note = 2'-O-Methyl-adenosine phosphorothioate
  modified_base 3: mod_base = OTHER; note = 2'-O-Methyl-guanosine phosphorothioate
  modified_base 21: mod_base = OTHER; note = 2'-O-Methyl-guanosine
  modified_base 28: mod_base = OTHER; note = 2'-O-Methyl-adenosine
  modified_base 29: mod_base = OTHER; note = 2'-O-Methyl-guanosine
  modified_base 30: mod_base = OTHER; note = 2'-O-Methyl-cytidine
  modified_base 31: mod_base = OTHER; note = 2'-O-Methyl-uridine
  modified_base 32: mod_base = OTHER; note = 2'-O-Methyl-adenosine
  modified_base 34: mod_base = OTHER; note = 2'-O-Methyl-adenosine
  modified_base 35: mod_base = OTHER; note = 2'-O-Methyl-adenosine
  modified_base 36: mod_base = OTHER; note = 2'-O-Methyl-adenosine
  modified_base 37: mod_base = OTHER; note = 2'-O-Methyl-uridine
  modified_base 38: mod_base = OTHER; note = 2'-O-Methyl-adenosine
  modified_base 39: mod_base = OTHER; note = 2'-O-Methyl-guanosine
  modified_base 40: mod_base = OTHER; note = 2'-O-Methyl-cytidine
  modified_base 41: mod_base = OTHER; note = 2'-O-Methyl-adenosine
  modified_base 42: mod_base = OTHER; note = 2'-O-Methyl-adenosine
  modified_base 45: mod_base = OTHER; note = uridine phosphorothioate
  modified_base 46: mod_base = OTHER; note = 2'-O-Methyl-adenosine
  modified_base 48: mod_base = OTHER; note = 2'-O-Methyl-adenosine
  modified_base 50: mod_base = OTHER; note = 2'-O-Methyl-uridine
  modified_base 52: mod_base = OTHER; note = 2'-O-Methyl-adenosine
  modified_base 53: mod_base = OTHER; note = 2'-O-Methyl-guanosine
  modified_base 54: mod_base = OTHER; note = 2'-O-Methyl-guanosine
  modified_base 55: mod_base = OTHER; note = 2'-O-Methyl-cytidine
  modified_base 56: mod_base = OTHER; note = 2'-O-Methyl-uridine
  modified_base 57: mod_base = OTHER; note = 2'-O-Methyl-adenosine
  modified_base 60: mod_base = OTHER; note = 2'-O-Methyl-cytidine
  modified_base 61: mod_base = OTHER; note = 2'-O-Methyl-cytidine
  modified_base 66: mod_base = OTHER; note = 2'-O-Methyl-uridine
  modified_base 67: mod_base = OTHER; note = 2'-O-Methyl-cytidine
  modified_base 70: mod_base = OTHER; note = 2'-O-Methyl-cytidine
  modified_base 71: mod_base = OTHER; note = 2'-O-Methyl-uridine
  modified_base 72: mod_base = OTHER; note = 2'-O-Methyl-uridine
  modified_base 74: mod_base = OTHER; note = 2'-O-Methyl-adenosine
  modified_base 75: mod_base = OTHER; note = 2'-O-Methyl-adenosine
  modified_base 76: mod_base = OTHER; note = 2'-O-Methyl-adenosine
  modified_base 77: mod_base = OTHER; note = 2'-O-Methyl-adenosine
  modified_base 78: mod_base = OTHER; note = 2'-O-Methyl-adenosine
  modified_base 79: mod_base = OTHER; note = 2'-O-Methyl-guanosine
  modified_base 80: mod_base = OTHER; note = 2'-O-Methyl-uridine
  modified_base 81: mod_base = OTHER; note = 2'-O-Methyl-guanosine
  modified_base 83: mod_base = OTHER; note = 2'-O-Methyl-cytidine
  modified_base 84: mod_base = OTHER; note = 2'-O-Methyl-adenosine
  modified_base 85: mod_base = OTHER; note = 2'-O-Methyl-cytidine
  modified_base 86: mod_base = OTHER; note = 2'-O-Methyl-cytidine
  modified_base 87: mod_base = OTHER; note = 2'-O-Methyl-guanosine
  modified_base 88: mod_base = OTHER; note = 2'-O-Methyl-adenosine
  modified_base 89: mod_base = OTHER; note = 2'-O-Methyl-guanosine
  modified_base 90: mod_base = OTHER; note = 2'-O-Methyl-uridine
  modified_base 91: mod_base = OTHER; note = 2'-O-Methyl-cytidine
  modified_base 92: mod_base = OTHER; note = 2'-O-Methyl-guanosine
  modified_base 93: mod_base = OTHER; note = 2'-O-Methyl-guanosine
  modified_base 94: mod_base = OTHER; note = 2'-O-Methyl-uridine
  modified_base 95: mod_base = OTHER; note = 2'-O-Methyl-guanosine
  modified_base 96: mod_base = OTHER; note = 2'-O-Methyl-cytidine
  modified_base 97: mod_base = OTHER; note = 2'-O-Methyl-uridine
  modified_base 98: mod_base = OTHER; note = 2'-O-Methyl-uridine phosphorothioate
  modified_base 99: mod_base = OTHER; note = 2'-O-Methyl-uridine phosphorothioate
  modified_base 100: mod_base = OTHER; note = 2'-O-Methyl-uridine
  modified_base 101: mod_base = OTHER; note = 2'-O-Methyl-uridine
  modified_base 103: mod_base = OTHER; note = 2'-O-Methyl-uridine

SEQ ID NO: 3180 - RNA, 103 nt, synthetic construct; identical to SEQ ID NO: 1700
  source 1..103: mol_type = other RNA
  modified_base 1: mod_base = OTHER; note = 2'-O-Methyl-cytidine phosphorothioate
  modified_base 2: mod_base = OTHER; note = 2'-O-Methyl-adenosine phosphorothioate
  modified_base 3: mod_base = OTHER; note = 2'-O-Methyl-guanosine phosphorothioate
  modified_base 21: mod_base = OTHER; note = 2'-O-Methyl-guanosine
  modified_base 28: mod_base = OTHER; note = 2'-O-Methyl-adenosine
  modified_base 29: mod_base = OTHER; note = 2'-O-Methyl-guanosine
  modified_base 30: mod_base = OTHER; note = 2'-O-Methyl-cytidine
  modified_base 31: mod_base = OTHER; note = 2'-O-Methyl-uridine
  modified_base 32: mod_base = OTHER; note = 2'-O-Methyl-adenosine
  modified_base 34: mod_base = OTHER; note = 2'-O-Methyl-adenosine
  modified_base 35: mod_base = OTHER; note = 2'-O-Methyl-adenosine
  modified_base 36: mod_base = OTHER; note = 2'-O-Methyl-adenosine
  modified_base 37: mod_base = OTHER; note = 2'-O-Methyl-uridine
  modified_base 38: mod_base = OTHER; note = 2'-O-Methyl-adenosine
  modified_base 39: mod_base = OTHER; note = 2'-O-Methyl-guanosine
  modified_base 40: mod_base = OTHER; note = 2'-O-Methyl-cytidine
  modified_base 41: mod_base = OTHER; note = 2'-O-Methyl-adenosine
  modified_base 42: mod_base = OTHER; note = 2'-O-Methyl-adenosine
  modified_base 46: mod_base = OTHER; note = 2'-O-Methyl-adenosine
  modified_base 48: mod_base = OTHER; note = 2'-O-Methyl-adenosine
  modified_base 50: mod_base = OTHER; note = 2'-O-Methyl-uridine
  modified_base 52: mod_base = OTHER; note = 2'-O-Methyl-adenosine
  modified_base 53: mod_base = OTHER; note = 2'-O-Methyl-guanosine
  modified_base 54: mod_base = OTHER; note = 2'-O-Methyl-guanosine
  modified_base 55: mod_base = OTHER; note = 2'-O-Methyl-cytidine
  modified_base 56: mod_base = OTHER; note = 2'-O-Methyl-uridine
  modified_base 57: mod_base = OTHER; note = 2'-O-Methyl-adenosine
  modified_base 60: mod_base = OTHER; note = 2'-O-Methyl-cytidine
  modified_base 61: mod_base = OTHER; note = 2'-O-Methyl-cytidine
  modified_base 64: mod_base = OTHER; note = uridine phosphorothioate
  modified_base 66: mod_base = OTHER; note = 2'-O-Methyl-uridine
  modified_base 67: mod_base = OTHER; note = 2'-O-Methyl-cytidine
  modified_base 70: mod_base = OTHER; note = 2'-O-Methyl-cytidine
  modified_base 71: mod_base = OTHER; note = 2'-O-Methyl-uridine
  modified_base 72: mod_base = OTHER; note = 2'-O-Methyl-uridine
  modified_base 74: mod_base = OTHER; note = 2'-O-Methyl-adenosine
  modified_base 75: mod_base = OTHER; note = 2'-O-Methyl-adenosine
  modified_base 76: mod_base = OTHER; note = 2'-O-Methyl-adenosine
  modified_base 77: mod_base = OTHER; note = 2'-O-Methyl-adenosine
  modified_base 78: mod_base = OTHER; note = 2'-O-Methyl-adenosine
  modified_base 79: mod_base = OTHER; note = 2'-O-Methyl-guanosine
  modified_base 80: mod_base = OTHER; note = 2'-O-Methyl-uridine
  modified_base 81: mod_base = OTHER; note = 2'-O-Methyl-guanosine
  modified_base 83: mod_base = OTHER; note = 2'-O-Methyl-cytidine
  modified_base 84: mod_base = OTHER; note = 2'-O-Methyl-adenosine
  modified_base 85: mod_base = OTHER; note = 2'-O-Methyl-cytidine
  modified_base 86: mod_base = OTHER; note = 2'-O-Methyl-cytidine
  modified_base 87: mod_base = OTHER; note = 2'-O-Methyl-guanosine
  modified_base 88: mod_base = OTHER; note = 2'-O-Methyl-adenosine
  modified_base 89: mod_base = OTHER; note = 2'-O-Methyl-guanosine
  modified_base 90: mod_base = OTHER; note = 2'-O-Methyl-uridine
  modified_base 91: mod_base = OTHER; note = 2'-O-Methyl-cytidine
  modified_base 92: mod_base = OTHER; note = 2'-O-Methyl-guanosine
  modified_base 93: mod_base = OTHER; note = 2'-O-Methyl-guanosine
  modified_base 94: mod_base = OTHER; note = 2'-O-Methyl-uridine
  modified_base 95: mod_base = OTHER; note = 2'-O-Methyl-guanosine
  modified_base 96: mod_base = OTHER; note = 2'-O-Methyl-cytidine
  modified_base 97: mod_base = OTHER; note = 2'-O-Methyl-uridine
  modified_base 98: mod_base = OTHER; note = 2'-O-Methyl-uridine phosphorothioate
  modified_base 99: mod_base = OTHER; note = 2'-O-Methyl-uridine phosphorothioate
  modified_base 100: mod_base = OTHER; note = 2'-O-Methyl-uridine
  modified_base 101: mod_base = OTHER; note = 2'-O-Methyl-uridine
  modified_base 103: mod_base = OTHER; note = 2'-O-Methyl-uridine

SEQ ID NO: 3181 - protein, 9 aa, synthetic construct
SSVFAQSIP

SEQ ID NO: 3182 - DNA, 33 bp, synthetic construct
  source 1..33: mol_type = other DNA
acactctttccctacacgacgctcttccgatct

SEQ ID NO: 3183 - DNA, 34 bp, synthetic construct
  source 1..34: mol_type = other DNA
gtgactggagttcagacgtgtgctcttccgatct

SEQ ID NO: 3184 - RNA, 100 nt, synthetic construct
  source 1..100: mol_type = other RNA
  misc_difference 1: note = a, c, u, g, unknown or other
  misc_difference 2: note = a, c, u, g, unknown or other
  misc_difference 3: note = a, c, u, g, unknown or other
  misc_difference 4: note = a, c, u, g, unknown or other
  misc_difference 5: note = a, c, u, g, unknown or other
  misc_difference 6: note = a, c, u, g, unknown or other
  misc_difference 7: note = a, c, u, g, unknown or other
  misc_difference 8: note = a, c, u, g, unknown or other
  misc_difference 9: note = a, c, u, g, unknown or other
  misc_difference 10: note = a, c, u, g, unknown or other
  misc_difference 11: note = a, c, u, g, unknown or other
  misc_difference 12: note = a, c, u, g, unknown or other
  misc_difference 13: note = a, c, u, g, unknown or other
  misc_difference 14: note = a, c, u, g, unknown or other
  misc_difference 15: note = a, c, u, g, unknown or other
  misc_difference 16: note = a, c, u, g, unknown or other
  misc_difference 17: note = a, c, u, g, unknown or other
  misc_difference 18: note = a, c, u, g, unknown or other
  misc_difference 19: note = a, c, u, g, unknown or other
  misc_difference 20: note = a, c, u, g, unknown or other
nnnnnnnnnnnnnnnnnnnngttttagagctagaaatagcaagttaaaataaggctagtccgttatcaacttgaaaaagtggcaccgagtcggtgctttt

SEQ ID NO: 3185 - RNA, 100 nt, synthetic construct; identical to SEQ ID NO: 55
  source 1..100: mol_type = other RNA
  modified_base 1: mod_base = OTHER; note = 2'-O-Methyl-cytidine phosphorothioate
  modified_base 2: mod_base = OTHER; note = 2'-O-Methyl-adenosine phosphorothioate
  modified_base 3: mod_base = OTHER; note = 2'-O-Methyl-guanosine phosphorothioate
  modified_base 21: mod_base = OTHER; note = 2'-O-Methyl-guanosine
  modified_base 28: mod_base = OTHER; note = 2'-O-Methyl-adenosine
  modified_base 29: mod_base = OTHER; note = 2'-O-Methyl-guanosine
  modified_base 30: mod_base = OTHER; note = 2'-O-Methyl-cytidine
  modified_base 31: mod_base = OTHER; note = 2'-O-Methyl-uridine
  modified_base 32: mod_base = OTHER; note = 2'-O-Methyl-adenosine
  modified_base 34: mod_base = OTHER; note = 2'-O-Methyl-adenosine
  modified_base 35: mod_base = OTHER; note = 2'-O-Methyl-adenosine
  modified_base 36: mod_base = OTHER; note = 2'-O-Methyl-adenosine
  modified_base 37: mod_base = OTHER; note = 2'-O-Methyl-uridine
  modified_base 38: mod_base = OTHER; note = 2'-O-Methyl-adenosine
  modified_base 39: mod_base = OTHER; note = 2'-O-Methyl-guanosine
  modified_base 40: mod_base = OTHER; note = 2'-O-Methyl-cytidine
  modified_base 41: mod_base = OTHER; note = 2'-O-Methyl-adenosine
  modified_base 42: mod_base = OTHER; note = 2'-O-Methyl-adenosine
  modified_base 46: mod_base = OTHER; note = 2'-O-Methyl-adenosine
  modified_base 48: mod_base = OTHER; note = 2'-O-Methyl-adenosine
  modified_base 50: mod_base = OTHER; note = 2'-O-Methyl-uridine
  modified_base 52: mod_base = OTHER; note = 2'-O-Methyl-adenosine
  modified_base 53: mod_base = OTHER; note = 2'-O-Methyl-guanosine
  modified_base 54: mod_base = OTHER; note = 2'-O-Methyl-guanosine
  modified_base 55: mod_base = OTHER; note = 2'-O-Methyl-cytidine
  modified_base 56: mod_base = OTHER; note = 2'-O-Methyl-uridine
  modified_base 57: mod_base = OTHER; note = 2'-O-Methyl-adenosine
  modified_base 60: mod_base = OTHER; note = 2'-O-Methyl-cytidine
  modified_base 61: mod_base = OTHER; note = 2'-O-Methyl-cytidine
  modified_base 66: mod_base = OTHER; note = 2'-O-Methyl-uridine
  modified_base 67: mod_base = OTHER; note = 2'-O-Methyl-cytidine
  modified_base 70: mod_base = OTHER; note = 2'-O-Methyl-cytidine
  modified_base 71: mod_base = OTHER; note = 2'-O-Methyl-uridine
  modified_base 72: mod_base = OTHER; note = 2'-O-Methyl-uridine
  modified_base 74: mod_base = OTHER; note = 2'-O-Methyl-adenosine
  modified_base 75: mod_base = OTHER; note = 2'-O-Methyl-adenosine
  modified_base 76: mod_base = OTHER; note = 2'-O-Methyl-adenosine
  modified_base 77: mod_base = OTHER; note = 2'-O-Methyl-adenosine
  modified_base 78: mod_base = OTHER; note = 2'-O-Methyl-adenosine
  modified_base 79: mod_base = OTHER; note = 2'-O-Methyl-guanosine
  modified_base 80: mod_base = OTHER; note = 2'-O-Methyl-uridine
  modified_base 81: mod_base = OTHER; note = 2'-O-Methyl-guanosine
  modified_base 83: mod_base = OTHER; note = 2'-O-Methyl-cytidine
  modified_base 84: mod_base = OTHER; note = 2'-O-Methyl-adenosine
  modified_base 85: mod_base = OTHER; note = 2'-O-Methyl-cytidine
  modified_base 86: mod_base = OTHER; note = 2'-O-Methyl-cytidine
  modified_base 87: mod_base = OTHER; note = 2'-O-Methyl-guanosine
  modified_base 88: mod_base = OTHER; note = 2'-O-Methyl-adenosine
  modified_base 89: mod_base = OTHER; note = 2'-O-Methyl-guanosine
  modified_base 90: mod_base = OTHER; note = 2'-O-Methyl-uridine
  modified_base 91: mod_base = OTHER; note = 2'-O-Methyl-cytidine
  modified_base 92: mod_base = OTHER; note = 2'-O-Methyl-guanosine
  modified_base 93: mod_base = OTHER; note = 2'-O-Methyl-guanosine
  modified_base 94: mod_base = OTHER; note = 2'-O-Methyl-uridine
  modified_base 95: mod_base = OTHER; note = 2'-O-Methyl-guanosine
  modified_base 96: mod_base = OTHER; note = 2'-O-Methyl-cytidine
  modified_base 97: mod_base = OTHER; note = 2'-O-Methyl-uridine phosphorothioate
  modified_base 98: mod_base = OTHER; note = 2'-O-Methyl-uridine phosphorothioate
  modified_base 99: mod_base = OTHER; note = 2'-O-Methyl-uridine phosphorothioate
  modified_base 100: mod_base = OTHER; note = 2'-O-Methyl-uridine

SEQ ID NO: 3186 - RNA, 80 nt, synthetic construct; identical to SEQ ID NO: 57
  source 1..80: mol_type = other RNA
  modified_base 9: mod_base = OTHER; note = 2'-O-Methyl-guanosine
  modified_base 10: mod_base = OTHER; note = 2'-O-Methyl-cytidine
  modified_base 11: mod_base = OTHER; note = 2'-O-Methyl-uridine
  modified_base 12: mod_base = OTHER; note = 2'-O-Methyl-adenosine
  modified_base 13: mod_base = OTHER; note = 2'-O-Methyl-guanosine
  modified_base 14: mod_base = OTHER; note = 2'-O-Methyl-adenosine
  modified_base 15: mod_base = OTHER; note = 2'-O-Methyl-adenosine
  modified_base 16: mod_base = OTHER; note = 2'-O-Methyl-adenosine
  modified_base 17: mod_base = OTHER; note = 2'-O-Methyl-uridine
  modified_base 18: mod_base = OTHER; note = 2'-O-Methyl-adenosine
  modified_base 19: mod_base = OTHER; note = 2'-O-Methyl-guanosine
  modified_base 20: mod_base = OTHER; note = 2'-O-Methyl-cytidine
  modified_base 49: mod_base = OTHER; note = 2'-O-Methyl-adenosine
  modified_base 50: mod_base = OTHER; note = 2'-O-Methyl-cytidine
  modified_base 51: mod_base = OTHER; note = 2'-O-Methyl-uridine
  modified_base 52: mod_base = OTHER; note = 2'-O-Methyl-uridine
  modified_base 53: mod_base = OTHER; note = 2'-O-Methyl-guanosine
  modified_base 54: mod_base = OTHER; note = 2'-O-Methyl-adenosine
  modified_base 55: mod_base = OTHER; note = 2'-O-Methyl-adenosine
  modified_base 56: mod_base = OTHER; note = 2'-O-Methyl-adenosine
  modified_base 57: mod_base = OTHER; note = 2'-O-Methyl-adenosine
  modified_base 58: mod_base = OTHER; note = 2'-O-Methyl-adenosine
  modified_base 59: mod_base = OTHER; note = 2'-O-Methyl-guanosine
  modified_base 60: mod_base = OTHER; note = 2'-O-Methyl-uridine
  modified_base 61: mod_base = OTHER; note = 2'-O-Methyl-guanosine
  modified_base 62: mod_base = OTHER; note = 2'-O-Methyl-guanosine
  modified_base 63: mod_base = OTHER; note = 2'-O-Methyl-cytidine
  modified_base 64: mod_base = OTHER; note = 2'-O-Methyl-adenosine
  modified_base 65: mod_base = OTHER; note = 2'-O-Methyl-cytidine
  modified_base 66: mod_base = OTHER; note = 2'-O-Methyl-cytidine
  modified_base 67: mod_base = OTHER; note = 2'-O-Methyl-guanosine
  modified_base 68: mod_base = OTHER; note = 2'-O-Methyl-adenosine
  modified_base 69: mod_base = OTHER; note = 2'-O-Methyl-guanosine
  modified_base 70: mod_base = OTHER; note = 2'-O-Methyl-uridine
  modified_base 71: mod_base = OTHER; note = 2'-O-Methyl-cytidine
  modified_base 72: mod_base = OTHER; note = 2'-O-Methyl-guanosine
  modified_base 73: mod_base = OTHER; note = 2'-O-Methyl-guanosine
  modified_base 74: mod_base = OTHER; note = 2'-O-Methyl-uridine
  modified_base 75: mod_base = OTHER; note = 2'-O-Methyl-guanosine
  modified_base 76: mod_base = OTHER; note = 2'-O-Methyl-cytidine
  modified_base 77: mod_base = OTHER; note = 2'-O-Methyl-uridine
  modified_base 78: mod_base = OTHER; note = 2'-O-Methyl-uridine
  modified_base 79: mod_base = OTHER; note = 2'-O-Methyl-uridine
  modified_base 80: mod_base = OTHER; note = 2'-O-Methyl-uridine

SEQ ID NO: 3187 - RNA, 80 nt, synthetic construct; identical to SEQ ID NO: 57
  source 1..80: mol_type = other RNA
  modified_base 1: mod_base = OTHER; note = 2'-O-Methyl-guanosine
  modified_base 8: mod_base = OTHER; note = 2'-O-Methyl-adenosine
  modified_base 9: mod_base = OTHER; note = 2'-O-Methyl-guanosine
  modified_base 10: mod_base = OTHER; note = 2'-O-Methyl-cytidine
  modified_base 11: mod_base = OTHER; note = 2'-O-Methyl-uridine
  modified_base 12: mod_base = OTHER; note = 2'-O-Methyl-adenosine
  modified_base 14: mod_base = OTHER; note = 2'-O-Methyl-adenosine
  modified_base 15: mod_base = OTHER; note = 2'-O-Methyl-adenosine
  modified_base 16: mod_base = OTHER; note = 2'-O-Methyl-adenosine
  modified_base 17: mod_base = OTHER; note = 2'-O-Methyl-uridine
  modified_base 18: mod_base = OTHER; note = 2'-O-Methyl-adenosine
  modified_base 19: mod_base = OTHER; note = 2'-O-Methyl-guanosine
  modified_base 20: mod_base = OTHER; note = 2'-O-Methyl-cytidine
  modified_base 21: mod_base = OTHER; note = 2'-O-Methyl-adenosine
  modified_base 22: mod_base = OTHER; note = 2'-O-Methyl-adenosine
  modified_base 26: mod_base = OTHER; note = 2'-O-Methyl-adenosine
  modified_base 28: mod_base = OTHER; note = 2'-O-Methyl-adenosine
  modified_base 30: mod_base = OTHER; note = 2'-O-Methyl-uridine
  modified_base 32: mod_base = OTHER; note = 2'-O-Methyl-adenosine
  modified_base 33: mod_base = OTHER; note = 2'-O-Methyl-guanosine
  modified_base 34: mod_base = OTHER; note = 2'-O-Methyl-guanosine
  modified_base 37: mod_base = OTHER; note = 2'-O-Methyl-adenosine
  modified_base 41: mod_base = OTHER; note = 2'-O-Methyl-cytidine
  modified_base 46: mod_base = OTHER; note = 2'-O-Methyl-uridine
  modified_base 47: mod_base = OTHER; note = 2'-O-Methyl-cytidine
  modified_base 50: mod_base = OTHER; note = 2'-O-Methyl-cytidine
  modified_base 51: mod_base = OTHER; note = 2'-O-Methyl-uridine
  modified_base 52: mod_base = OTHER; note = 2'-O-Methyl-uridine
  modified_base 54: mod_base = OTHER; note = 2'-O-Methyl-adenosine
  modified_base 55: mod_base = OTHER; note = 2'-O-Methyl-adenosine
  modified_base 56: mod_base = OTHER; note = 2'-O-Methyl-adenosine
  modified_base 57: mod_base = OTHER; note = 2'-O-Methyl-adenosine
  modified_base 58: mod_base = OTHER; note = 2'-O-Methyl-adenosine
  modified_base 59: mod_base = OTHER; note = 2'-O-Methyl-guanosine
  modified_base 60: mod_base = OTHER; note = 2'-O-Methyl-uridine
  modified_base 62: mod_base = OTHER; note = 2'-O-Methyl-guanosine
  modified_base 63: mod_base = OTHER; note = 2'-O-Methyl-cytidine
  modified_base 64: mod_base = OTHER; note = 2'-O-Methyl-adenosine
  modified_base 65: mod_base = OTHER; note = 2'-O-Methyl-cytidine
  modified_base 66: mod_base = OTHER; note = 2'-O-Methyl-cytidine
  modified_base 67: mod_base = OTHER; note = 2'-O-Methyl-guanosine
  modified_base 69: mod_base = OTHER; note = 2'-O-Methyl-guanosine
  modified_base 72: mod_base = OTHER; note = 2'-O-Methyl-guanosine
  modified_base 73: mod_base = OTHER; note = 2'-O-Methyl-guanosine
  modified_base 74: mod_base = OTHER; note = 2'-O-Methyl-uridine
  modified_base 75: mod_base = OTHER; note = 2'-O-Methyl-guanosine
  modified_base 76: mod_base = OTHER; note = 2'-O-Methyl-cytidine
  modified_base 77: mod_base = OTHER; note = 2'-O-Methyl-uridine
  modified_base 78: mod_base = OTHER; note = 2'-O-Methyl-uridine
  modified_base 79: mod_base = OTHER; note = 2'-O-Methyl-uridine
  modified_base 80: mod_base = OTHER; note = 2'-O-Methyl-uridine

SEQ ID NO: 3188 - RNA, 80 nt, synthetic construct; identical to SEQ ID NO: 57
  source 1..80: mol_type = other RNA
  modified_base 1: mod_base = OTHER; note = 2'-O-Methyl-guanosine
  modified_base 8: mod_base = OTHER; note = 2'-O-Methyl-adenosine
  modified_base 9: mod_base = OTHER; note = 2'-O-Methyl-guanosine
  modified_base 10: mod_base = OTHER; note = 2'-O-Methyl-cytidine
  modified_base 11: mod_base = OTHER; note = 2'-O-Methyl-uridine
  modified_base 12: mod_base = OTHER; note = 2'-O-Methyl-adenosine
  modified_base 13: mod_base = OTHER; note = 2'-O-Methyl-guanosine
  modified_base 14: mod_base = OTHER; note = 2'-O-Methyl-adenosine
  modified_base 15: mod_base = OTHER; note = 2'-O-Methyl-adenosine
  modified_base 16: mod_base = OTHER; note = 2'-O-Methyl-adenosine
  modified_base 17: mod_base = OTHER; note = 2'-O-Methyl-uridine
  modified_base 18: mod_base = OTHER; note = 2'-O-Methyl-adenosine
  modified_base 19: mod_base = OTHER; note = 2'-O-Methyl-guanosine
  modified_base 20: mod_base = OTHER; note = 2'-O-Methyl-cytidine
  modified_base 21: mod_base = OTHER; note = 2'-O-Methyl-adenosine
  modified_base 22: mod_base = OTHER; note = 2'-O-Methyl-adenosine
  modified_base 26: mod_base = OTHER; note = 2'-O-Methyl-adenosine
  modified_base 28: mod_base = OTHER; note = 2'-O-Methyl-adenosine
  modified_base 30: mod_base = OTHER; note = 2'-O-Methyl-uridine
  modified_base 32: mod_base = OTHER; note = 2'-O-Methyl-adenosine
  modified_base 33: mod_base = OTHER; note = 2'-O-Methyl-guanosine
  modified_base 34: mod_base = OTHER; note = 2'-O-Methyl-guanosine
  modified_base 35: mod_base = OTHER; note = 2'-O-Methyl-cytidine
  modified_base 36: mod_base = OTHER; note = 2'-O-Methyl-uridine
  modified_base 37: mod_base = OTHER; note = 2'-O-Methyl-adenosine
  modified_base 40: mod_base = OTHER; note = 2'-O-Methyl-cytidine
  modified_base 41: mod_base = OTHER; note = 2'-O-Methyl-cytidine
  modified_base 46: mod_base = OTHER; note = 2'-O-Methyl-uridine
  modified_base 47: mod_base = OTHER; note = 2'-O-Methyl-cytidine
  modified_base 50: mod_base = OTHER; note = 2'-O-Methyl-cytidine
  modified_base 51: mod_base = OTHER; note = 2'-O-Methyl-uridine
  modified_base 52: mod_base = OTHER; note = 2'-O-Methyl-uridine
  modified_base 53: mod_base = OTHER; note = 2'-O-Methyl-guanosine
  modified_base 54: mod_base = OTHER; note = 2'-O-Methyl-adenosine
  modified_base 55: mod_base = OTHER; note = 2'-O-Methyl-adenosine
  modified_base 56: mod_base = OTHER; note = 2'-O-Methyl-adenosine
  modified_base 57: mod_base = OTHER; note = 2'-O-Methyl-adenosine
  modified_base 58: mod_base = OTHER; note = 2'-O-Methyl-adenosine
  modified_base 59: mod_base = OTHER; note = 2'-O-Methyl-guanosine
  modified_base 60: mod_base = OTHER; note = 2'-O-Methyl-uridine
  modified_base 61: mod_base = OTHER; note = 2'-O-Methyl-guanosine
  modified_base 63: mod_base = OTHER; note = 2'-O-Methyl-cytidine
  modified_base 64: mod_base = OTHER; note = 2'-O-Methyl-adenosine
  modified_base 65: mod_base = OTHER; note = 2'-O-Methyl-cytidine
  modified_base 66: mod_base = OTHER; note = 2'-O-Methyl-cytidine
  modified_base 67: mod_base = OTHER; note = 2'-O-Methyl-guanosine
  modified_base 68: mod_base = OTHER; note = 2'-O-Methyl-adenosine
  modified_base 69: mod_base = OTHER; note = 2'-O-Methyl-guanosine
  modified_base 70: mod_base = OTHER; note = 2'-O-Methyl-uridine
  modified_base 71: mod_base = OTHER; note = 2'-O-Methyl-cytidine
  modified_base 72: mod_base = OTHER; note = 2'-O-Methyl-guanosine
  modified_base 73: mod_base = OTHER; note = 2'-O-Methyl-guanosine
  modified_base 74: mod_base = OTHER; note = 2'-O-Methyl-uridine
  modified_base 75: mod_base = OTHER; note = 2'-O-Methyl-guanosine
  modified_base 76: mod_base = OTHER; note = 2'-O-Methyl-cytidine
  modified_base 77: mod_base = OTHER; note = 2'-O-Methyl-uridine
  modified_base 78: mod_base = OTHER; note = 2'-O-Methyl-uridine
  modified_base 79: mod_base = OTHER; note = 2'-O-Methyl-uridine
  modified_base 80: mod_base = OTHER; note = 2'-O-Methyl-uridine

SEQ ID NO: 3189 - RNA, 80 nt, synthetic construct; identical to SEQ ID NO: 57
  source 1..80: mol_type = other RNA
  modified_base 1: mod_base = OTHER; note = 2'-O-Methyl-guanosine
  modified_base 8: mod_base = OTHER; note = 2'-O-Methyl-adenosine
  modified_base 9: mod_base = OTHER; note = 2'-O-Methyl-guanosine
  modified_base 10: mod_base = OTHER; note = 2'-O-Methyl-cytidine
  modified_base 11: mod_base = OTHER; note = 2'-O-Methyl-uridine
  modified_base 12: mod_base = OTHER; note = 2'-O-Methyl-adenosine
  modified_base 14: mod_base = OTHER; note = 2'-O-Methyl-adenosine
  modified_base 15: mod_base = OTHER; note = 2'-O-Methyl-adenosine
  modified_base 16: mod_base = OTHER; note = 2'-O-Methyl-adenosine
  modified_base 17: mod_base = OTHER; note = 2'-O-Methyl-uridine
  modified_base 18: mod_base = OTHER; note = 2'-O-Methyl-adenosine
  modified_base 19: mod_base = OTHER; note = 2'-O-Methyl-guanosine
  modified_base 20: mod_base = OTHER; note = 2'-O-Methyl-cytidine
  modified_base 21: mod_base = OTHER; note = 2'-O-Methyl-adenosine
  modified_base 22: mod_base = OTHER; note = 2'-O-Methyl-adenosine
  modified_base 26: mod_base = OTHER; note = 2'-O-Methyl-adenosine
  modified_base 28: mod_base = OTHER; note = 2'-O-Methyl-adenosine
  modified_base 30: mod_base = OTHER; note = 2'-O-Methyl-uridine
  modified_base 32: mod_base = OTHER; note = 2'-O-Methyl-adenosine
  modified_base 33: mod_base = OTHER; note = 2'-O-Methyl-guanosine
  modified_base 34: mod_base = OTHER; note = 2'-O-Methyl-guanosine
  modified_base 35: mod_base = OTHER; note = 2'-O-Methyl-cytidine
  modified_base 36: mod_base = OTHER; note = 2'-O-Methyl-uridine
  modified_base 37: mod_base = OTHER; note = 2'-O-Methyl-adenosine
  modified_base 40: mod_base = OTHER; note = 2'-O-Methyl-cytidine
  modified_base 41: mod_base = OTHER; note = 2'-O-Methyl-cytidine
  modified_base 46: mod_base = OTHER; note = 2'-O-Methyl-uridine
  modified_base 47: mod_base = OTHER; note = 2'-O-Methyl-cytidine
  modified_base 50: mod_base = OTHER; note = 2'-O-Methyl-cytidine
  modified_base 51: mod_base = OTHER; note = 2'-O-Methyl-uridine
  modified_base 52: mod_base = OTHER; note = 2'-O-Methyl-uridine
  modified_base 54: mod_base = OTHER; note = 2'-O-Methyl-adenosine
  modified_base 55: mod_base = OTHER; note = 2'-O-Methyl-adenosine
  modified_base 56: mod_base = OTHER; note = 2'-O-Methyl-adenosine
  modified_base 57: mod_base = OTHER; note = 2'-O-Methyl-adenosine
  modified_base 58: mod_base = OTHER; note = 2'-O-Methyl-adenosine
  modified_base 59: mod_base = OTHER; note = 2'-O-Methyl-guanosine
  modified_base 60: mod_base = OTHER; note = 2'-O-Methyl-uridine
  modified_base 61: mod_base = OTHER; note = 2'-O-Methyl-guanosine
  modified_base 63: mod_base = OTHER; note = 2'-O-Methyl-cytidine
  modified_base 64: mod_base = OTHER; note = 2'-O-Methyl-adenosine
  modified_base 65: mod_base = OTHER; note = 2'-O-Methyl-cytidine
  modified_base 66: mod_base = OTHER; note = 2'-O-Methyl-cytidine
  modified_base 67: mod_base = OTHER; note = 2'-O-Methyl-guanosine
  modified_base 68: mod_base = OTHER; note = 2'-O-Methyl-adenosine
  modified_base 69: mod_base = OTHER; note = 2'-O-Methyl-guanosine
  modified_base 70: mod_base = OTHER; note = 2'-O-Methyl-uridine
  modified_base 71: mod_base = OTHER; note = 2'-O-Methyl-cytidine
  modified_base 72: mod_base = OTHER; note = 2'-O-Methyl-guanosine
  modified_base 73: mod_base = OTHER; note = 2'-O-Methyl-guanosine
  modified_base 74: mod_base = OTHER; note = 2'-O-Methyl-uridine
  modified_base 75: mod_base = OTHER; note = 2'-O-Methyl-guanosine
  modified_base 76: mod_base = OTHER; note = 2'-O-Methyl-cytidine
  modified_base 77: mod_base = OTHER; note = 2'-O-Methyl-uridine
  modified_base 78: mod_base = OTHER; note = 2'-O-Methyl-uridine
  modified_base 79: mod_base = OTHER; note = 2'-O-Methyl-uridine
  modified_base 80: mod_base = OTHER; note = 2'-O-Methyl-uridine

SEQ ID NO: 3190 - RNA, 100 nt, synthetic construct; identical to SEQ ID NO: 55
  source 1..100: mol_type = other RNA
  modified_base 1: mod_base = OTHER; note = 2'-O-Methyl-cytidine phosphorothioate
  modified_base 2: mod_base = OTHER; note = 2'-O-Methyl-adenosine phosphorothioate
  modified_base 3: mod_base = OTHER; note = 2'-O-Methyl-guanosine phosphorothioate
  modified_base 6: mod_base = OTHER; note = 2'-O-Methyl-uridine
  modified_base 9: mod_base = OTHER; note = 2'-O-Methyl-adenosine
  modified_base 13: mod_base = OTHER; note = 2'-O-Methyl-guanosine
  modified_base 20: mod_base = OTHER; note = 2'-O-Methyl-uridine
  modified_base 21: mod_base = OTHER; note = 2'-O-Methyl-guanosine
  modified_base 28: mod_base = OTHER; note = 2'-O-Methyl-adenosine
  modified_base 29: mod_base = OTHER; note = 2'-O-Methyl-guanosine
  modified_base 30: mod_base = OTHER; note = 2'-O-Methyl-cytidine
  modified_base 31: mod_base = OTHER; note = 2'-O-Methyl-uridine
  modified_base 32: mod_base = OTHER; note = 2'-O-Methyl-adenosine
  modified_base 34: mod_base = OTHER; note = 2'-O-Methyl-adenosine
  modified_base 35: mod_base = OTHER; note = 2'-O-Methyl-adenosine
  modified_base 36: mod_base = OTHER; note = 2'-O-Methyl-adenosine
  modified_base 37: mod_base = OTHER; note = 2'-O-Methyl-uridine
  modified_base 38: mod_base = OTHER; note = 2'-O-Methyl-adenosine
  modified_base 39: mod_base = OTHER; note = 2'-O-Methyl-guanosine
  modified_base 40: mod_base = OTHER; note = 2'-O-Methyl-cytidine
  modified_base 41: mod_base = OTHER; note = 2'-O-Methyl-adenosine
  modified_base 42: mod_base = OTHER; note = 2'-O-Methyl-adenosine
  modified_base 46: mod_base = OTHER; note = 2'-O-Methyl-adenosine
  modified_base 48: mod_base = OTHER; note = 2'-O-Methyl-adenosine
  modified_base 50: mod_base = OTHER; note = 2'-O-Methyl-uridine
  modified_base 52: mod_base = OTHER; note = 2'-O-Methyl-adenosine
  modified_base 53: mod_base = OTHER; note = 2'-O-Methyl-guanosine
  modified_base 54: mod_base = OTHER; note = 2'-O-Methyl-guanosine
  modified_base 57: mod_base = OTHER; note = 2'-O-Methyl-adenosine
  modified_base 61: mod_base = OTHER; note = 2'-O-Methyl-cytidine
  modified_base 66: mod_base = OTHER; note = 2'-O-Methyl-uridine
  modified_base 67: mod_base = OTHER; note = 2'-O-Methyl-cytidine
  modified_base 70: mod_base = OTHER; note = 2'-O-Methyl-cytidine
  modified_base 71: mod_base = OTHER; note = 2'-O-Methyl-uridine
  modified_base 72: mod_base = OTHER; note = 2'-O-Methyl-uridine
  modified_base 74: mod_base = OTHER; note = 2'-O-Methyl-adenosine
  modified_base 75: mod_base = OTHER; note = 2'-O-Methyl-adenosine
  modified_base 76: mod_base = OTHER; note = 2'-O-Methyl-adenosine
  modified_base 77: mod_base = OTHER; note = 2'-O-Methyl-adenosine
  modified_base 78: mod_base = OTHER; note = 2'-O-Methyl-adenosine
  modified_base 79: mod_base = OTHER; note = 2'-O-Methyl-guanosine
  modified_base 80: mod_base = OTHER; note = 2'-O-Methyl-uridine
  modified_base 82: mod_base = OTHER; note = 2'-O-Methyl-guanosine
  modified_base 83: mod_base = OTHER; note = 2'-O-Methyl-cytidine
  modified_base 84: mod_base = OTHER; note = 2'-O-Methyl-adenosine
  modified_base 85: mod_base = OTHER; note = 2'-O-Methyl-cytidine
  modified_base 86: mod_base = OTHER; note = 2'-O-Methyl-cytidine
  modified_base 87: mod_base = OTHER; note = 2'-O-Methyl-guanosine
  modified_base 89: mod_base = OTHER; note = 2'-O-Methyl-guanosine
  modified_base 92: mod_base = OTHER; note = 2'-O-Methyl-guanosine
  modified_base 93: mod_base = OTHER; note = 2'-O-Methyl-guanosine
  modified_base 94: mod_base = OTHER; note = 2'-O-Methyl-uridine
  modified_base 95: mod_base = OTHER; note = 2'-O-Methyl-guanosine
  modified_base 96: mod_base = OTHER; note = 2'-O-Methyl-cytidine
  modified_base 97: mod_base = OTHER; note = 2'-O-Methyl-uridine phosphorothioate
  modified_base 98: mod_base = OTHER; note = 2'-O-Methyl-uridine phosphorothioate
  modified_base 99: mod_base = OTHER; note = 2'-O-Methyl-uridine phosphorothioate
  modified_base 100: mod_base = OTHER; note = 2'-O-Methyl-uridine
